United States Patent Application Publication US 2026/0258423 A1 - sequence listing, part 46

SEQ ID NO: 301568 - DNA, 83257441 bp, Homo sapiens (residues 14,943,650-17,078,456 of 83,257,441)
  source 1..83257441: mol_type = genomic DNA
aggcggaggttgcagtgagccaagatcgcgccattgcactccagcctggacaacaagagtgaaactccgtctcaacaacgacaacaaaagaaatattcagtgaaaaaaattaagaggtaaagaaaagtgtgtgtgtgtgtgtgtgtatgtatatctacctatatatacatatatataaaatcctgtagtttatctcttttaaaaaataaaagaacatttgcttatttaaaaaaatgaaaaggcaaaccataactttaaaaaaaaatggttacttaaaagagaaggagaaaatagcgtggaggggataagacttagttgaaaataccttgttttgtagatgtgactttagaaccatataaatattttataagattataaaatgaagtcaaaaagtaatctttaaatatcgaaagtaaaattaggtaaatgagccttcctatgtattaacatacagtgggtggtgaaaccactcagtaagaaattaatctaagtaagaaattactttaaaagatagtaatttgaatgtaaaatttttgtgtgagatagcctaaggactaaaagaactggggaagaaactttttcagaatcatactgttggtggtgaagtttgtatcattatgctgaggctgatacagtgagagatatgtgtgttacttaatgtgttgctgtcattgggaactgatacagtgagagatatgtgtgttacttaatgtgttgctgtcactgggaactgagagaattagtatagttgaaaggatagacagatgtaagattgatcaggttaagtaaaatttctatagtttttaattaaaatgggaagtacgattctgaactcatgatatcttataacttaatatgtgtttcctagtgccatccacggaaaaggcctataaacaatgaccaacccattaatagtgagcacccagattaagagctctaaataccatttcccacatagaaacctcagagaaatggctaatttcaggactgaggcaggaaaaatacaaggtgagtctggaaatagttgttatttcaaaaatcaagaaaactatccaacactgctaggtttctgtcacaaggactccatctgtggcttaggcacccaatggccaacgagggaacaattggaatatcaataagaataataataactgagacaatctgaagttcatcagatatgtttaaattcatgagtttataacaattctcaaacaaatcaaaccaaacaaaatctagactattggacttctttggaggatgctaagtaacaatcttattattattattattattattattattatttttgagatgaagtctcactctgtcgcccaggctggagtgcagtggtgcaatctcggctcactgcaatctccacctcccaagttcaagggattctccagcctcagcctcccgagtagctgggactacagatgcattccacctcatccggctattttttatatttttagtagagatagggattcaccatgttggccaggctggtcttgaagtcctgacctcaggtgatccacccacctcagcctcccaaagtgctaggattacaggcgtgagccactgcacctggccagcagctttatgttttaaaacaagctaaaaaatggttgaaaagaaggttgaaagaatcaaacatattctgtctttcttatagaacctgtagtagtcaacagttgacaacggaagtttttaaaaataaaagtattgtagctaataagtgaaaaatgaatgacaaattttgaatgccatcattttttgtcctctaataatttaatgtatctagatcggggtcaatacacattttctgccaagaaccagaaagtaaatattttaggcattgcgggacatatagtgtctgtcacgaaggctcaactctaccattagggtgcaaaagcagccaaagataatatgtaaaccgatgggctgcgttccaataaaactttatttacaaaaacaagcagtgggccagatttgccttttaggtttgcctacccttgatctaggtaatgattatcaatggctgctaacatcatcaaaagggggacattgtgtacctccagatggaagtacgtactaccacctatgaggcagacttgatggggaaaaaagcaaaccaggctctgaccagcctataattctacattctacatttcagggaattcaatagatacctaacaccacgagagtgcaaccagcaaaatacagatttttggaagttctgtaggatgaaggcccttgtgtcctcaatacgcaactgcaaggaaaaaagaagatagaaggataatgtattgattaaaagacacttaagagacataatagccatttaaaatataaataaaaataattgccctcacaagtctaaattcttgacttaactcttatgtagagcagtttaactaacatagctcttctccagtgttcaattcccagggccatcaagattcttcctcagaaagtctccatcctccctagaagggaattggaagcaatattttatccagtttctctgggaaagaaaaattatccaggagacagcaaagagggcaatcccaagacactatggagaataaaactccccttccactttttcagtaatattccactgtttgttttatctaacacacatttctctagtaggatgtacaaaaaatagctttatgtttagacaaaatgtaaatattttaacaatctgtcatttaacaagtgaggacactggaaatcatctaaaaatgctttattttgtatatagcatttggtaaattgattacttttactttctcttcggctttattttctcacaaagtaatcattgccgtgtggaatgcacagtcatttttacgtaggatgcacaactcagagggctattaactccctgaaaacaacaggctgctaatatacacatttttttcttgtttggatttatttctcaccagagaactatagtgtatcccaattaactatgaatctcagactgtggtaaactgcaatagccacagcccttgtcaagcctgaaacatatgtgagttctctgcaggttagaactaaattactgtctcagtaatgaaaataaatttgccaattaattcacgtaatcaaatctgactgaattttgttctgaagcagcgcacacctgagagtcttaagacatttgattcttcgagctcattacctgcgggcaatttttttcacttttcgtcagagaacaggctctgttcaggctcctcctcaagccttaaaaggaattctctatgtagtcagcagtaatacaagaaattagaataaccactacaagcccctattgggctggatactgggctgggtatagcaactggatgagaagttagcaaagtaaaagatcatggaaaagaaataagtagacatgaacttccatgcttcaccttccatgtatgaaaaaatagaaccgtaaagaattgtttgatctgagcacaaagtgagctaaactctttcacacattccccagcttgtgacagatggcagcaattccatcagtctctgattttagtacatgtcccttttctctaattgcacactgcccaaatcaagcttttgctaattaattgggtttccattcctatgcctactgctgggatctccccatatatctgctcttcacctggtgtctcctctccacatgtgcaatgaccagctttgagtttcagattccctggctcccaacactcggaagcaaaatataaccatgggcaggaaggcttgagagaagacatgcattagaaatcagttgcctcaggattccatctccagtgttgttacacagagcctgggtctctggctaaaactctgtattcttgttgttcataatttgatctgagtttgttatttgcattatccagaacttctgcccaatgtcctcctctgtcttcccctggtttcttagccttgtttcctgagctccaatacctgaattctgtgaaccactgaacttttacttacctagaacatgtctttctcctttcttaagcctattttacagaacatgatttttttttaatgatgaaacaatgtatatttagaattagtcagttggactcagtttagatgatcccaatcttgttggcaatatccaaagcatgataaacagtggaatgtatgccttcttctctccaccaggccctgattaggttattgacattggccacatcagtgtcacagagtttcttcacagcctgtttgatctggcacttgttggctttggcatccacagtgaacacaggcatgtggttgtcttctgtcttcatggtggactcggcagttgggagcctgacgatggatggcatgatggtcaagcttgtttctcctgggggtgctcttctgaagacatttgagctgcctctggaaccacagtgtcttgggtcccagaaggtgggtgacttgtggatctttttttgtgtctgtggatgcctctcatctctgccttcttggctttcaaaacctttgcttttgcttcagctttgggaggggcaggaacttccttcttcaccttcagtgccatcttgtgaaaatggcccttgatatttcttgcctgcctggcgttctggtcttacctgaccttatctgatttaattaacctctccagttctttcctttaactgaccttgtctgtctttctgtgatgaaatacctggacaaaggtacagaaagaggatgactagactcagctattgtcccaagaatgcattctattataaattaagctaacaaatcaacatgttggagttcttattttaaattagctcctgctaaatatatatagattttataataaaacacaaaagttaaaagaaaaacgtagatgttctctgtcacctaataagaggaagtctttgacagtaactctggcagaagaactatggcaaagtggttaggcagatgagctactgagttcaacagatgggaattaaacccttgtcttgtagattttgttgtgtatcagctcagagactttgggtaaggttacctagcctctctcactctcagtttcctcagctataaaatggtactcacctgtattatcatgggaagatatttcgtctttctccccagttcctggcacaaagctcctaaaacccttggaatttcctgggtgataggagtatcttttgttctaatgaggtgattctctccaaaacccaagatagcttcagaatggaggctggtcaccagaaagaccaagactttattagaagcttgaaaccttcagcgccactccccaacctccaaggaggagagactagagattgaattaatcaacaatagctaactcattaagcaatcatgtctacctagtgagagttccattaaactccttgaacaacagagttcagagagcttccaggttggtgaacatatggaggtgctggaagagtggcaggaccggagagggcatggaagctctgtgtcccttctccacactttgcccaatgcatctcttccatttgacagttcctgagttgtatccatagtaataaacaagtagtagtatgtaaaacactttcctgagctctgtgagctattctagcgaattgtggaaactggggaggggcctaaagaaaccccctgaatttatagccagttggtcagaagtacaggtgacaacctgggacttggtgactggtgtctgaagtgggggcagtcttgtgggaaggattgaacccttaatttgtgaaatctgatgctaactgcaggaagacagtgttggaattgacatgaattgtaggatacccagccggtgctggagagttggagaagtggtgttgaaaaggatgccacacatttggggtcagaaatgtcgtgagtaaaaacagttcatttccacctcatagggtcattaaggaaatacaatcagataatgtccataaaatgctttcagcagtgcctgggtcttgataatgactctataaagggttattgttgctgtggttgttactattattgaataaggttgacacgctacacaaagatgaaagagcctggcctgaacagagatgcgaatgcttagccacccatatctgcactaagattttccgtaggactttggggtcttgtttaatcacttgaaagcagcctgttttctaaatcatatgcttgatttttattaaaaataccattaagccacgctgtaagacagcagtcaatgaaatgaaataaaatgttttcttggccgggcacctggctcacgcctgtaatcccagcactttgggaggcggaagcgggcagatcacttgaggccagaagtttgagaccagcctggccaacatggtgaaacacggtctttactaaaattacaaaaattagctaggcgtgatggcacatgactgtaatcccagctgctcgggtggctgaggcaggagaatcacttgaacctgggaggcagaggttgcagtgagccaagactgtgccactgcacttcagcttgggtgacagagtgagactgtcccaagacaaaaaaaaaaaaaaaaaattattaagctggaacctctagtgcatatatttttgttcacaaatcatgtacacgtaccatgtcaatcacaatattatatagtggcaatccctttctaaattatttagatacaagataaaaagagattctacttgtttcttctctcacccaaatggattgtcaggcatttgctctggagggagtgcatcccagttggaggtcactactgcaagggctgagccaaaccacagttctccagacagtactggggtggggggtttcgtggatgagcctgaactggaattcaaaggccagtactgtttgcaggcctgggccacgaacagctctcagccatatgttttaagaagctgatttgcatgggaagaggtgacctgcaaggaagaaatttatgtttgcctggaaataagacaggaaaatggagagaacaatgtgatgtctatttactaatattactccaaggagaaaatctcagccccgcagagagagtattgacaggcagcagccaagggagatttccaatctccagtgagacctagggaacctgagacagctgaatgttggggaccttctctctgcttatgctctctctgcttggcatcaaggaagaatgcagggaattctttggtacctcaagacttggaagtttggatagtcttgaaaaacagccccaacagagacttcacattctccaagaaaataccagggttggaccaccccaccagatggctccagaggcagtttgcttctacaaacaacctggaacagaacttcctgtgaatacactcccagggtacattccaaggcattccctaagtgactaggttggaggtggcctgaattcccatgtcgggtaaatgaaatacaaagtgctagtccaatttacatcgtcaccaacagcccaccacctccttcattttatattcctgttctccagcctgggtcctagggcaaagtcctcagggtacagtagatggtctacagcctggatgaatgtggaagaaagtgtctggcattataaggtcatggtgtcaaatcctccagcttgcaaagggcaagttcaagttccacaaagtcacaaagtcaaatgaaagcaccatttcctttgttaaggagaaatatcagcagtaataagtttcttatgtggccatagcagaggtcaccgagtggtcatatgtagcctgccatgggttgtacatgtccaacacagcgttttacaattttgagcaggaatacctttagatagaacacgtgccctgccctccaacacagcccaaaccactccttttatattcaatttctttcactcaagtggtttgccaggctcctgaagttccttgatctctcagtgccttctttattccagttctcattgcaccatcgcgagaatgccaacatattgatgacaagaaaggttgaagatgcccagttaggagaacgggtggcaggctgggaattctcaacatacatttaaagtgtgagttcttctatctggagcagttcgttcaagtgtaaagtgagcttgctgttcttctaaaaagcccctcctcctttttgttcctaatgtgctgtaatctcagagttcttcacggtagatcagtgggctgactagcaaaatgagaatatgttaggcctggcatcaggacctttgcattccagtttctgctttgcagctagttcatgctgtagcctcacaccaaatgctttgcctcttcaaatcataaagaaaatgaaggggttgtgttggatgatcttcaaagaccctccaggctctttccttcaagtgattccatttttctacgtaggaaggggagcatattttgctggtgagaaccattgtgtctgaagagaattactgttccatggccctggtctggaatttattctgcttacagattttgaaatgcttcagccagatttatgctatttttttctggcccaagactttctatgaaaagtaattgcctgcaagatattatacaatttattcagcatgtcccagaaagctatggaaatctgggtcttccacacacttagggtagaattcttctttgagatggaatctgtaatggcccaaaaaggtatggcagcagcaaacagggattcctctagaattaccaccacaggaagcttggggatatcagtccttctcccttgacaaaatatcttgtccctgaggaagctcaatacaatataggaagccctgctatcatgtcacaaggtataagtatgccatatggtggcccaggaaacctgactctatagtgaaagtaatgaaaggaaagagacttccgtgtcacatgtgaaatgaaggttgggttagaggtttattgtgaggacaaagagcagctattataaggttatagtgccacgatgccaatacactcacccgcaggcttctcgctctgatcataaaaggatgttggtccccaagggcacacttctctgtattttaggaagaagagctaggatgtctggggtcctctccctggggtctaatgtggcccatgccaccccttccctttcacaaatgctattatggagaaacttgaccatgcagaacataagacagcatagaaaaatagagaaactgtaccatatacaccagcattgccaaagcttggtatcgtgctgggggtggaactgagaataagagagagagaaagaaaagagaaaaagaaagaatggcagagatggattctgaattcctatttgtcactgttatttatttatttatttattttggttttttgtttgtttgtttttttgagacggagtcttgctcttttgcccaggctggagtgcaatggcgtgatctcggctcactgcaacctctgcctcccgggttcaagtgattctccttccccagcctcctgagtagctaggactacaggtgtgcaccaccatgcccagctaatttttgtatttttagtagagatggggtttcaccatattggccaggctggtttccaactcctgacctcataatctgcccacctcggcctcccaaagtgctgggattacaggcatgagccactacacccggccactgttacatttgaagaaagcagtaaactgtcctcccgcaggattcagcatcatgtattctcagtaatgcagaaatcaccattgaagttggagccttatatgaagggaagtgaggcttcattggtggaacaagccaccagaagtgcatacaagaaatgccagcgatgggaaaagggacttgcccaagagtcaaatctgaggaataaccaccttcaggcaggtggggtcatttctatggcttggagtcattgcagacaggacctacttatcagacccattagtcagatggacaatcaaacccaagccgtatgcttcattcaacgactatttactgagcacatttaatgtacgagactctgctctagcctttgggaataaagaagtgagcaagataagcaacacacctggcctcaaggactttgtatttggctggggatgtgatacaatgtagaaaaaaaaatgaatgcacaggatggtttcaaacctctcctattacaaagacatcaaaatgaagtagtgtgatgggaaaggaggcggggagggggcttccctcttgagcagtgacgccatttaccaactacataaccttgaagaattacttaactctgtgagtccatggtcccatctgtaaaatcatgttaataaatagtacccatctcaaagcgttgctataaaagaataacggagataatgcatgtgcatagcacaatgcccgactgagtgtctttagccccatattactgcagttccaggcacgcctgacagcaggcatgtgagcaacctgaagccaaactgtccatctgaatcctgcagattcctgacccacagaaaccatgagaggtagtaaaataatcattgtggttttcagccactaagtctttgggtagtttgtcatgcagcaacaaataattagaaaaacgctattttatctgaaaaggtggagactttcttttattatttttccctggaagagaaaaactcttccagaagggtttgttatcaggaaagcctgttctaaaatataatgtattaaagaaaaatctgaggttcagtaaggctgactgatcaggaaaaaactgccattgaaaagatagtttgttactcacagttcccaagaggagtgggcaaaccatgcaagaggctccacacagggaagctccagggttgattgagtcacaagaataagagtgagttttgggcaagagtctttattgtgatttctccaggaaggaacaggcaagacaaggcaagcaggcttaggattagcaagtttgaataatttcagtgaggtctggcacataggggctatttcctagtgtgattagggcagatagagaggggtccagagtattacagccccataaaggatgtggttaaaaatgtgtgggctctgaatcggtgggtttatatttgaaaagtcggagagttgtctccaagaattggctaaccctaggaagggcaatccctccagggtcagcaaggccccagatatcaaagcatcagaatataggaaataaaagacatggttagtacagaacctaccaagcagtatagaagaagacaatgtctgaatctcatgttcctgggatcccttgtggccagggcactgatttatgatccattcgtagcttctgggacctaaggaggggcatatgctagaagaaaaagattttgattctgagaatgattttcttccttgataaaagagagagagacttgcacaagaagaagccctgtcctcctttcccattttgaacattgatatatgaggactgcaagcttccagctaccacccacattagcttgtggccgggaggagatgaccaagaggatcacagagaaggcaacctgaggtcccataccagtgagccccagttcaactctgccaccctatttttatttaagtaatatggtttttgtttttggggttttttttctttggatatttggttacttgcagccagagtataactgacatatgatgttggccagcaatgagtaacaccatgagacaatcacttgcttctaattcccggacctcctataaccaccatacttggaagagagagagagagggggaagtttagttacctttccacaatagtaaaaatattacttgagaactcatggttgacaactgccaatttgtaaaacatgagaaggaagagcttggttaagttgggggttcacttacatgagaagagagacagatgggggacaaaagtgaatgctggaagccctgaagaccagaatccacttccacatgttgtcttgggcaggggctgcctgctgagggccatgcctgatgttcactgcactgacacatatggaagctgtgaggagtgtttcatatggtccatggatgcccttcattacagcatagttggaaaatacaggattcagatggctgtgattctgagcatcccagcagtatctgctagtagaatagggaagaatccctgtaatacaaaatcagaggaaaaaaaggatgatgagtactctgaaattttaattggtgaaataaggatgtgggatgtactattttggtctactggaaaggggtgggtgcatgttgcctcaacctactgaacttcattgagtgtttctttttcttttagacagagtcttgctctgtcgcccaggctggagtgcaatgatacgatctcagctcactgcaacctctgtctcccaggttcaagcaattctcctggctcagcctcccaagtagctgggactacaggcacgtgtcaccacacccggctaatttttgtatttttagtagagaacaggtttcaccatgttggccaagctggtcttgaactcctgaccttgtgatccacttgcctcagcctcccaaagtgctgggattacaggtgtgagccaccgcactcggccaagtgtttttgtttgtttgtttgttttttgttttttgtttaatagaacatccctaatcacagggattgatttaaagatgttattttatgttaagtgaaatatagttatcttgaagttgcaatctgttggtcacggggaagaaaatattgctgaagaaggggaaataaaagcagaattggtaaaataaggaaaaataaaaatccattatgattaggatacccacgtctaaaccatcatccgaattctgcctcaactagtctattgactgtcttgagtgaaaatggttgcggtgatgagatgtattttccttccatgctggaggattttctttccatctgcactgttaaagctgttgggttatttcacccacttccacgtctgctgggctctctctctccatgtttgctgcattccacacaattactggtagtgtgtgccagatacaagcactggggatatagtaacagatcaaacaggcatcattcccaatgtgaaactatgtttttggacccacacagccagttttttgtttgtttgtttgtttgtttttgagacagcgtctcgcactgtcgcccaggctggagtgcagtggcgtgatattggttcactgcaacctctgcctccgatgttcaagtgattctcctgcctcagcctcacgagtagctgggattacaggcgccagcaatcgcacctggctaatttttttgtatttttttttttttagtagagacaaggtttcactatgttggcgaggctggtctcaaacgcatgaccttgtgatctaccagcctcggcctcccaaagtgctgggattacaggcgtgagccactgtgcccagccacagccagttgattttttgctgctgtgtaggtaaacacaaatacaaaatgcctattataatcactatttccaactctacttgctgaggtagtgatcacgtaacccccaacccgcagccctctccatttgataggcactgtgttttctgtttctactttggcaggaaactccaaggaacagaggagctcagagaagactagaactctgtattccgtacccgtaaacaatttgtataagcaaaataaaactttttaactttcctcatcccaatctgcattatatttccctctggccattttgccacatggcctaggagttggggctgagtaaatgccagctcaggaatgtgtcctagacttcccatgaggggagggcagtaaagacatgatgccagtgctgttggtttccttccctcctgggatagagcttgagggaagagacaagcaaggtggaagaaatattgccataagcagcgtgagcatttggtcatagagggaagagccaagggacagtcacagaccccaaaggacaccccatgctctgcctgttgccaccccaacagagcatggccatggccgtaacaaagaggaggctgagtgtgggacgttaagaagagagagggcctgaggtagtacttgtgtgtctctttagagcccatgaactagttatccagaagatctttatgcagccaaacaacaacaacatggaaatcagaggtcccagaggacgtcccaagggggcagagaggagcaaagcaggaaaccagcggaaaacctaccacggggccatctaggcatggggcacggtgccctgatgctggggtgagtgaagtaaaccaagacatggacagaggatggcagggggctaccaggacctctggcctcaggagaaccaaggtgggactaagtcacccagaaaggacatggggcctgcagatagactaggtgtgtaccggctgccgcagacacagaggaagcccgaggacaccaccaccgtagcaatggaggaaccacggagagctccaggacatggatgtacatgggaactaagccttcttcccactgctgtcacaaggccactggggctaccaaggatgcctagatgccatctggaaaaagaataggaggaaggagaataaatagactgggcaagcaagtgggatactgcaaggactatttagttcagaaggaactaaaatgccattaagaggtaagtggtgagtttaagtcttatctcctctcccttaccctctacttttattcagcagagtgattttttcttatctgagtagaatgtataaatttcaaccatgctacatacgtaatcaccaaatacctactagagcaaagtcacttcaagtgtggccacctgaccagctcccaagacaacactgcttgtcaggggaccatacattgaaggtcactgtcaggaagcatgcagctgagcctgtctctagagatgagcaggtctgcatcaggcagcttcagagtaaggcagacccacccatcacttatgatttatttcttctgttaatcatctggattatctggaaatcatcttgtctattaatgtgggctcaactgcacaactgaggcatgaacgatgacccttgaagatttcagcctagtttcattgttactgaaaatgatagcaatgacaaatttcttcattcctacatccccctatttattctgcatcctctgtgtcctgctagtgttgaaaaaataacccagtcctatgcctgtcccataaacagaatacaagggtcacctggtctcccaaagtccacctgttcactgacattaggtcagtacagtcgtctgcacaaggaattagttccaggatccctacctgcaaggataccaaaatcccagcatactcaagtcctctgtatccatgggttccaaggatatggagagtcaactgtatggttcccccatgaaaataattagaaatgtagttggttacatcagggtagggtaaaagcgtatgattcgacttaaatacctcaaagatattatgccctctagggtcactgggatgccagactttttggtaagaaaaagacactgctcacatcttgggatgggcaaggagaagagagagcaactgcaggaatctgtgtgggagtttgggatgattctgattggagcaatggggctgcagctgtgtgggttcagccaacctcttcattctaaagggagaccctgaaaaccacagagcagggacacagtgggcaatcagcctagctatgtacgagaagaggctttaaagcttcccattagattacactctgtttctcagtgatgcttggaaaaaagccaagcctctcaaaagatgcatgtcaattcactaaagcagcatggaggtgggagtggagggagtctgttaatcatctacatagatccttgctactcaaactgtggctgggagaccagtagcatcagccacatattcaaggatcttcttaacattgcagaatctcaagcttcattccagactactgcatcagcatctgcatattaacaagatcccaagtaattagcacatggaaagttgagaggtactgctgttctcataccctagctgcgcactgtaaccacctgggcaatttttaaaaggcatgcctaggagtgaagcccaggtcttatgattttttaattccatgattttaatgtgtagccaggaaggatcagttgttctcaaacattagcaagcatcagcatcagctggaggatttgttgcaggtactgaatcagaaactctggaatagggctgttaggctttggagtttctggttcagtaggtttggcgggagcagagaatttgcatgtctaacaatttctcaataatgctgaagatcctggcccccagaccacactttgagtaccttgaccttaatggagataagaacaaagttcccacactagcagtatcaacatcacctgggaacttattacaaatgctgtttgctactgaatgctactgaattagaaattctgggggtggggcttttcaatcacttttaacaagccttccaggtgattcttatgcagccttaagtttgagaacctccagttgcagtggctcatgcgtgtaatcccagcactttgggaggctaaggctggtggattgcttgagttcaggagttcaagaccagcctgaccaacatggtgaaaccacatctctacaaaaattacacacaaaaaattagctgggtgtggtggtgtgcacctgtagtcccagctacctgggaggccaaggtggaaggatcacctgagcccaggaggtcaaggctgctgtgagccatgatgacgccactgcactccagcctggatgacagcaagaccctgtctaaaaaaaaaaaaaaaaaaaaaagtgtgagaatcactggtctgggtgtttactcacaaggtgctgaatagtcagtaattggaaatagatttaaaaaaaaactgccctatgtttgcctacctttttccatgtgtttgatctttgtaaaccaagtaaccttttgtaacctgacttggctaaatggtagagagccttgaactctggccagacctcctggacatttgtccactcagggcacaagagcaataagaataatcattcatatatgtatatatgtatatttgtatatctgaatgtatatataaatatatatatctgacttaaaatttcacaatgagccacatcaaccctggcagctgagtacgacaggtactggcttccatttcacaggcgtgcctctgagaaatgaaggaaagcagataatggttccctagccatcatctttttcctcattccttctgcccatcagaaacccgatactgttcaagaatctactctcttccttataatttaagagaaactgatgagtagattctaattactcttagccagtggttctcaacatcagcagcctgaggaattttataaaatattgataccagattctgcccccagaggttgattttattggtctggggtatgctctgggcattgtgataattaaaagattccccagtggattctaatatgcagccaagggttcaaaccactggtctaagccaattgtggtaacctcatgcttttcaccaataattggcttaagggagacttgtgatgtggtctggccagttggtcgtgctcaagagctgttaggaaaagggctgcttgttcttaaagagaagaagacagtcactgtactgcctcgggatgttgttgaatttaaatgtgatggctggagttgctgcagccattttgttgccatcctatagatgaacccaatacacaaaaaaggacaaagccaaggaaaactacagatccagagcctagggccagcactcctaaacctgcccatttcacattacttatagtgcatcagatgataaatcttattatttacattctggtgacttagggttgtctgttcctggctgccaaagttgtactagcagaaacattaggtgatgcagctgaagccacacacttaagataaatgtggattcgggtcttctgattccagctccagggctcttttccctaaattatacttttctttgtagaaccctgggcaggatattttgccatgaaaactgcccaggaactcactttgggccagcagctacaaaagagaattaccaccattgcatcttaaggattgaatttccttgctcttacaaaagtgtttggaggttgtttgccagcaactttcaagttaagcacattaaactaagggtagggtggaggtgacagaaattacgcattttatttgtcctgactagaaattgggcatgtctctatttaaattgaagaataactaaatcacttacaggattaataaggagagaagacctttgggagccagatgataatgatgtacatagttttctggatatacacaaagggatggtttaccctggaaaaaccaagtaatttaaaaaaggctatgttaatttcaggcttccttaggaacactggggggtgaagtacatcagtggataaagttagtagaaaatgaacacattggtggagagaatgagtgacacagaggaatgtaattaatcttatataggggcaggcagaaaggggaaagtctcaaacagtgaggcaatttgtcagagagtgaagccaacagagatggatgacatttttgtttcttatgtgaataaactattgtgtccctggaggcacaaactgaaggtggaattattttcaaggatgatactctgatcatttcaaaatatgcaaagcaccaagtactgcactgcatctgtcatcatgggtgtaccatcaagataaaataaaagtaggttgtgcatatacaatgaggagaatgaagtaaccatccaggtgatgtgcttttgtgttttgcgttaagtgagaatatggttaaatatgaaggcaacagagcaaattgttgatcagctgacttactctaatcaattaagacagttgtaataaactagtcattagccatttggtatactcatcatcttgccatctaattgggtcaattgttcactaatgtaattcagtgttcaggattctaccaattaataaccaaatgggtacctcatctacctctacactccaatcgtcatctctcgaagggaatgggagtctaacaaaatcaatagagctgcggaatatacatgaggaatatttggtaaagatgattacatgcaccgggagtatggtgtcaaatgtccagacgtaattgttattattagcccataaaattaatttcaaggttaggactgtccattagtgaaaagacctcatctaaggagctcgtacgtgtaagcaagccctggcacctaggagctggctggactctgtggggatgttatgaggaccctgcacggtaacaagcaatgatctaacttattcatctataggtgtgttcctggtggtctttggctggaagctattgacattggctagatagaaaatacacaaaaatttagttccaaatatttctaactgtttaggaccttattaggaaaaaaaaatctgcatttgtgagagagtgtttacttcagtgccaggttaatgagaactggctattcttactccctctttcagattttccagctgtctttgtagaaacctctgcttctgaccatatttccatggtttgttcacaaaagctcagcagttcaaccaaaacagtttgtttgtggatctttcttagtggtgactcaccaaacaccctactgaacagctctctcagttgctcagactccaaatcttggagacatccttgacaaatgtatataaataaatatgtatatatacatgcagatatctatatatgtattacacacacacacttggcatccagacttttagcaaactgagtcagctcaatattaagaatgttggccaggtgcagtgactcacgcctgtaatcctagcactttgggaggccaaggcgggcagattgcctgagttcaggggttcgagaccagcctggggaacacggtgaaaccccgtatctactaaaatacaaaaaaattagccaggcatggcagcgtgtgcctgtagtcccagctactcaggaggctgaggcagaagaattgcttgaacccaggaggtggagcttgcagttagctgagatagtgccactgcactcctctagcctgggcgacagagcgagactttgtctcaaaaaaaaaaaaaaaaaagttaatggaaaaaccgtttattctgagccgatgtgtgtgagcatgacccagggaacaatctcaagaagtcctcagaaaatgcgcccacggcagtctcattagtttggtgttatacattttagggagacaggagttacagcaaggacataactcaatacatgaaagataacattggtttagcccccaaagggaggacatgttgaagtttggacttacaggttatagttggatttagagattctttaatttgtaattcattgaaggagtaaggctttgtctaaaattttggaatcagcagaaaaaaaaaatgttttcagataaggatttctgttaaccaatacattgggtcagagtgacctctaaagggatgtgactcaacctttgccttgcatgaccttaggccctatttataatttggtatcttttgttacagagtccgctctagtagtcttttgatttctattttaacattaatgctagtcacttgtggctaaactccaaaagggagagggtataatgagttgtgtctgacttcccatctcttcatggctgggaattcagtttttagggtttttctggggtcaccttggccaagaggggatccattcagtcagtgggggactcagaattttgtctttagtttgcgagagaatatcccaaatatggtcacctctcaccacccccaccattaccgtatgggtgggtctctcctgaactatttcaatggtcttccaaatgtcccctccccttctagcctagtctttgtacagaaggcagagtgttgatactcactagataatatcactctgtgcttgaaaaacacttcccatgtcatcttgattaagttctaaatctctcaccattgttacaaagtcctacataagctttctgctggctacctctgtgacctaacgtcccacagatctctgcctggctcactctgttctaggcacatcaccccccaggactgttccttgatcactgtgggtgctgtcccacctcgggaacattcacttgctgtttcctcagcctgcaaccgtcttctctcaaatatctgcagagctggccttactcaccgtcctgacagagtttatcctctagcgtttggtggtggttgtggggcaaaattcgttgggtagtgcaatcaacaaatactgattctttgatcacagcatctttatttttttttattatactttaagttctagggtacatgtgcacaacgtgcaggtttgttacatatgtatacatgtgccatgttggtgtgctgcacccattaactcgtcatttgcattaggtatatctcctaatgctatccctcccctctccccctaccccatgacaggccccagtgtgtgatgttccccttcctgtgtccaagtgttctcatggttcaattcccacctatgagtgagaacatgtggtatttggttttttgtccttgtgatagtttgctgagaatgatggtttcctgcttcatccatgtccctgcaaaggacatgaactcatcctttttatggctgcatagtattccatgggatcacagcatctttaaagaacctaaagattatcttaaaaatcatctcattcaaccattttattctacaagatagaataaaaggaagttcataggtcaaatgtatcatctgaagtcacccaaccagttagttgcagatcagggtccacaacccagttaagtgatctttgcatgaatcattcagccagtcaaatctgttaaattatgaagtagtatttttatttgttgggacaagttgatttgatcagcattacttgatacagtaatgctatattactaaatttcagagagttctaggttgagaattttcatttatattccaaacatattacatatttatgtgatcaagaaactttctcaattactttctatgctttctttttcctccaaaactttttgacctcctatatacttattcagtaaatattaaagacctagcagtctagaatggagctcggatgtgtacataaataatgattttaaataaaaattttaggaagtcagctagtatttttaggtagtttataatgggaacagcatgagagctggagacaggtgagagaggaaaggtttctgccagctgtgaaaacaagggaaacctcaaatggaagagatggcatttggactgagggatgaccaggatttggacactaaggggaggaaaaagcaaatcggctagagagaagagtacaagtaaaagcaaagtatctacaccagcctgggcaacatggcaagacaacatttctatgaaacaaacaaaaattggctgggcatggtggtgcatacctgtagtcctagctactcaggaggctgaggtgggaggattgcttaagcccgggaggtcaaggctacattgagttgtgatcgtgccactgcactccagcctcagcaacagggtgagaccctgtctcaaaaaagaaagaaagtgttctacaacagaggattcgctgctgttccaactgtttataaacacgctggaaacagaacatggtgaagaagaatcctcctgtttgctctgtgactccctcccccactcacctcagtgaactccagcaggtatttagtttcacaagatattcctggtccacaaagtgctcttttcttaaactcttgggaatagttaaaatacttgcctcaggattgttattcactttaatttgcataaagtatcaaatgaaacatttaagtggtacaattacagaaatactgagaattcctggtcaatcgcaatctgaagaatacaaatcaagtcaacccactcacctcacttggaggcactgacatgttatcccctccctggatggtggctgggggccattgagaaagagaagtgccctcctttcttccttcaggccaggtggatgtccatcttcgcagaatgccacctgagttttatcctgaaaaggcccacaccacatggaggcaccctctgtgagccaggatcctctgtacctcaagctgaccctcactcggcacagcctgagtcccaggcactggcaggaagcctcaggctctaaccacctgacctggccccagcatttacctgccagatgcctgtctgcctgtgcaggggaaagaaaattctttcttttccatcttaggttcatggatgaggtgcttaataacaaaagacagattaacaagagaagagcatacatatttatttaacgtaaatttcatgtgacatgggagtcttcagaaatgaagatttcaagaatcaggaaacctgtgtatttttgtgcttaggtttgataaagagtggacagtcatgcaggaagtatgactggacaaagggggtgtgagctaatggtagtagagtagagggacttagcagggcctgtttagatttattgccacctgtgaatccttaagggtcttgcctcctcagaggaaaaattcagctaaggggcagaagtaggtttaaggcagaggaagagaccaaggcacattttagagcaggaatgaaagtttactaaaaagttttaaagcaggaatgaaaggaagcaaagtacactttttaaattattattatatttttctgtaagttattggggtacaggtggtatttggttacatgggtgagttctttagtagtaatttgtgagatcctggtgcacccatcacccgagcagtatacactgcaccatatatgttgtcttttatccctcgccccctccctctttccccccaagtccccgaagtccattgtatcattcttatgcctttgcgtcctcatagcttagctctcacctatcagtgagaacatacaaagtttggtttctcattcctgagttacttcacttagaatcatagtctctaatctcacccaggtcattgcaaacgctgttaaatcattcctttttatggctcagtagtattccattgtgtatatatatactatatatatatattatatatactgtatattgtatatatatagtatagtatgtatatacacattatatatataatatatattatatagtatgtatatttatatatataccacagtttatccactcgttgattgatgggcatgtgggttggttgcacgattttgtgattgtgaattgtgctgctataaatatgcatgtgcaagtatctttttcaaatagtgacttcttttcctctgggtagatacccagtagtgggattgctggatcaaatggtagttctacttttagttctttaaggaatttccacactgttttccatagcggctgtactagtttacattcccaccagcagtgtagaagtgttccctgttcactgcatccatgccaacatctactattgtttgattttgtagccattcttgcaggagtgaggtggtatcacattgtggttttgatttgcatttccctgatcattagtgatgttgagcattttttcatatgtttgttggccattttttatatcttttttttgagaattgtctattcatgtccttagcccactttctgatgggattgttttttttcttactgatttgagttcctcgtagattctgcatattagtcctttgtcagctgtatagattgtgaagatttttctcccaatctgtgggttgtctgtttactctgctgactgttccttttgccatgcaaaaatgtagtttaattaggtcccagctatttatctgtgtttttatgggattcctttttgggtttttggtcgtgaaatccttgcctaagccaatgtctagaagggtttttccaatgttatcttccagaatttttatagtttcaggtcttaggtttaagtccttaatccatcttgagctgatttttgcataaggtgagagatgaggatacagtttcattctcctacatatggctagccaattattccagcaccatttgttgaaaaggtgtcctttcccactttatgtttttgttagctttgtcagagatcagttagctctaagtatttgggtttatttctgggttctgtgttctgttccattggtctatgtgcctatttttatacaagtaccacactgttttggtgactatggccttaaagtatagtttgaaatcaggtggtgtgatgcctccagatttgttctttttgcctagtcttgctttggctgtgtgggcccttttttggttccatatgaattttagaattgttatttctaactctctgaagaatgatggtggtattttgatggagattgcattgaatctgtagattgcttttggcagtatcgtcattttcacaatattgattctacctgtccatgcacatgggatgtgtttccatttgtttgtgtcatctattttttttttttttgggacagagtttcgctctttcgctcaggctggagtgcagtggcatgatctcggctcactgcaacttccaccttctggtttcaagtgattctcctgcctcagcctcccaggtagctgggattacaggcacctgccaccatgcctggctaatttttgtatttctggcagagacagggtttcaccatgttggccaggctggtctcaaactcctgacatcgtgatccacccacctcagcctcccaacgtgctgggattacaggtgtgagccacggcaccctatctgtctatgatttctttcaacagtgttttgtagttttccttgtagaggtcttttgactcctttgttaggtatattcctaagtattttatgttttttgcggctattttaaaaggggttgagttcttgatttgattctccaactcaccattggagtataaaagagctactgacttgtgtacattaatcttgtatctggacactgctgaattatcagttctaggagctttctggaggagtgcttagggttttcaaggtaaatgatcatatcatcagcaaacagggacagtttgatttcctccttaccagtttggatgccctttatttctttctcttgtcgatggctctggctaggacttccagtactatgttgaagaggagtggtgagagtgggcctccttgtcttgttcccgtcctgagagggaaagctttcaactcttccccatttggtattacattggctgtgggtttgtcatagatggcttttattatgttaaggtatgtcctttgtttgcggattttgctgagggttttaatcataaggggatgctggattttgtcaaatgctttttctgcatctattgagatgatcatgtggtttttgtttttaattctgtttatgtggtgtatcacatttattgacttgtgtatgttaaaccatccttgcatccctggtatgaaagaaacccacttgatcatggtggagtatctttttgatatgtggttggattcggttagctagtattttattaaggattttagcttctatgttcatcaaggatattagtctgtagttttcttttttgattgtgtcctttcctggtttgggtattacggtgatgctggcttcatagaatgaattagggagggttctttcttcctctatcttgtggaatggtgtcaaaatgattggtaccaattcttctttgaatgtctggtagaattctgctgtgaattcatctggtcctggatttttttgttgttggtaattttttaattaccatttcaatctcactgcttgttattggtctgttcagggtatctaattcttcctgatttaagctaggagggttgtatttttccaggaatttatccatctcttctaggttttctagtttatgtgtataaaggtgttcatagtagccttgaatgatcttttgtatttcagtggtgtcagttgtaatatctcctgtttcatttctcattgaggttatttggattttctctcttcttttcttggttaatcttgctaatggtctatcaattttatttatcttttcaaagaaccagctttctgtttcatttctcttttgaattttttttgtttcaatttcatttcattctgctctggtcttggttatttcctttcttcttctgggtttgggtttggtttgttcttgtttctctagttccttgaagtgtgactttagattgtctttttgtgctctttcagactttttgatgcacctaacaccggagctcccaaatttataaaacaattactaatagacctaagaaatgagatagacagcaacaccataatagtggaggacttcaatactccactgacagcattagacaggtcatctagacagaaagtcaacaaagaagcaatggatttaaactatgttcaggaacaaatggacttaacagatacatacagaacatttcatccaacaactgcagaatacacattctattcaacaatgcatggaactttctccaagatagaccatatgataggccataaaatgagcctcaataaatttaagaaaattgaaattatattaagcactctctcagagcacagtggaataaaactggaaatgaatgccaaaaggaaccttcaaaaccacacaaatacatggaaattaaataacctgctcctgaatcagcattgagtcaaaaaatgaaataaagatggaaattttaaaattcttcaaactgaatgaaaataatgacacaacctatcagaacctctgggatacagctaaggcagtgctaagaggaaaattcatagccctaaacacctacatcaaaaagtcagcagcaaagtacccttgaagagggtctagcaggcaactggagagatccaagtgccttattcatcccttgacttggggttttatatattgacatgatttgggtggtttgtgtttcttctccccagttcttctcttagggatggctatctgcatgcacagcagcctgccagcacttaagaatgtgcagtttgcatgtgcagtgtgcatgtgcagtgtgtttactgaagctgtacacatgctaacttgaggcatttttcccttaccagttgaacatcaccagaggaagatcatatactggttaaactctgccattttgcctcttagtgagcatgcttgagcctgctcacccaacttctgagatcttatccggaagctgctgatcgccagcttcaggtgttttctatccactgggagactgtttctctggtgccagctgtgacctattgtcattttagacagtttaacaaccgcctgaccatcacttgatggtcacttgaccctcgtgggcaggggccctctcctaccctgctcatgtctgcctaaccacctactctgatagattcttctctgtgtcccctgtgtcttcagagagaaggaagcccctttgctctgggtatagggaggtcacttctcacatgaggatcttgtgatctgcttcaggacagaagggtagaaaaggaaagtcagagagaccttcctgcttctgctgttttctcaaatgccatggtgccatattttgggatagtgtgtcctgaactccatcagctgcttccttccaaccctgataattactcaattacatgtttctggaatcccctccagtctcaccaagagaggaacacgactagtagttgccagtttgtttttcctgggccctgtggtcacatctgttgcaggttaccattgtcttcccctgttgacttggagctctggtaaacctccttcctcgaacccagtctccctcttcttcagccctctattaggttgctgttacaacagcctagttgccttgatatgcagcagcctctgctgtctcgatgtgactgttgatacaaagtagctttcatttctagttcttatcagtttgctcctcaatcttaacagtgttttccctgggagtaaaccaagtctccttccagccttggaaggaggatatgaaggttgagagtttgagtttaccatacagaaatgtgcagggagggtctgtgcaggcccacccctagatggcttgcctggtgggcccctaaatgttatatctgcatcacagaaggactctgcaaatgagcttctctttctgattatttaacctaccttttcagtgatcttagcaattacttatgagctcttttacttttttcagttttgtctgttttattaaatcaaaaaaatgtgtgatcttttacactgatcataggcctagaccaaatctagatggaagaaagatttttaaagcctttggatatttaggagtataattttccaacttaattggagttgatatctcagtgccatatgcaacagggaaattactaaggaaagtgttgagattattcctcttaaaattatttctgtgttagcatctacactttgcagatatagatatttttatatttagctcctttctcttcctggttttataaggtaatgcacataagcaactgaaatagtgtctgacatgtgctaagtgggcaataaatgttagctattaaagcattctgcgctgctgtttagatgagaaggcagaggcgagaagacttaggaacagttcctttcttgtgtttacattgttcctagaagaaattaaacatgtgtgcaaatcacccagccagggatgaatatgtgtcccagggaggctggtgtctgctgtttgttcattttcaggatccttgtactcaggaaacaatgtggagtctcccctaggttggcagtcacagcctctctctgaagtgtgaaaggccacatgattcatctctacgaccctcagtggtcaatgataaggaaatgttaatgccagttcttaaagagcttaagagttttgttgttgttgttgttgttgttgttgttttgagatagagtttcactcttgttgcccaggctggagtgcaatggcaccatcttggctcactgcaacctccgcctcccgggttcaggctattctcctcctgcctcagcatcctgagtagctggatttacaggtgtgagccaccatggcaggctaattttgtatttttagtagagacagggtttcaccatgttggccaggctggtcttgaactcctgacctcacgtgatccacccatctcggcctcccaaagtgctggaattacaagtgtgagccacctcacctggccttaaagagctttccatgtcaaagtctatcttgggaactgaccagctgcctcctacccataagaagatgccttcgaaacctcattttttcatctagcactgcccattttttgagcgtgagaaagtctctaattgaataatgcagactaaataccattatctaattgttaatgtgtttaatatcagcagggttatttacaccagcattttttagaggagttggtcacttgatcacatttcttaatttggaagactattgttccccctactccatcttctccctgcccctagtaagcgaaaagagatgcatgtggacatgtgttccaggggcaggtgcatcctgcttagtaggaagaggccatctggaaacactgggccagatgttggaatctgcatggttaaaacacaactaaatgaatgataatatactagacatttaataccacccagttccattttctttcttatttgtagtaataagcatggagtactgtgcacccaaagagatgaaggtagatttcatttatacactctggtgtggaatggctctgtccagacccagggcccctgggtgcccaccttgggttcttctcagaatagcccttttatcttagaccacaatgtgtgcacctccctagaggtgagaatttcccatcacatgtgttagatgttgcagaacacgtcccgggaggctggcagtggtttcttctcccattcacagctaaggggtttccagaagggggatgcaagcagctgatgttctccaaaattctagcaactgtaaactgagcatactcagggggacgggttgccagtcatatttccttttgcccggtactttgccaccggcagattctaaaatgctgcatttccagccacatcccagaacacttttagctcagtttcacaattcctttaaaaaaaaaaaaatcactaagttcttatgcccctgccccctcttccctttgggctcgaggttctttcccccagctgctgctgcactgagataaggctgtggtattttccctgctattccacaatcatacattatcataagaaagtgccaggcatccatcagcccacagcccctgatttatgctcaaagttgggattatctattctgtgccaaatcccttcaaacggccaacctgatcaaagagaatcacatccaccagataaaattcgaatatagctccatgcaatagaatgacaggcaggaatttttttttaatctccaaactgcttcaacctcctcattttgtcaggaattgttctttatccacagtgcagaacacgctgagcaaccttattgtccttcctgcatccttcccgctgggttctgagtggggagccatttatggagtttgctcttggggtaggagtcattgtccaccaataattccctgcctgcagcttgcagcaaccaagtctagctcagcccagagccaggtagaggagaaacattacagtacatggatcagtctgacttaacaaccagttgctaactatgacagtgtgtaaccgggagaaagccaagattagaaagcagtgtctttaatgctggggaccatctcagtgactaaattaaattgaatatcctctaaatccaatcattcagttcattcactcagcaaatatttattgaatgccttatatgcaaggctttgttgaacccaagaagtatagcatcaaggaacttgatatctagaaagaaaagacgtacccgggttataaaataaataaagcatagcagagatctctagttcgaaagaggaatctgagccccatgaactcaactacaccttcctcccaccttccaccccaaattcctagtgaattgaccaaagaatctagcgtagaatttagagggaaatccacatcactactggaaactaagaaaggattgtatccactgccagaaaccttgagggatttctagaaaatataaagcaggtaagtctagatgaaggtaagagcttattaacacgcaggtcaccacatttggagggcaaatgtactaaaagatgaaagaaaagaggaaacctcacaaggcaaaataaaccacagagaaattggctggaagtaagaagggagagtagacaacccaacacactccgagtccatccatctcccaataccaaataggacctatgaagcctggagaaaaatcaccaaacaggaagcatgcagttctatttcaaaagctagaaggcaatccaaaggcacaagagtctagtgttctttttgcaacagatttcctgggagaaatacaataaaaattcacaattttgaaaacttatacctccaataatagaattttataggaagttatatctctgaaaaagtagcaagcatacaaattatctcattctccatactggagacaatagaatattactttattcttgacactgatacagaaatataagttcagtgttttgggttctttgtatttaaaggttaccaaggtaagactaaaaacgttctctaaaattgtgttgccttcgggctgctaaattctaagacactgccttccaaatcaccagcttgattcagaatggcagtccaagtctgcatatttgaccactaatctcacagttcccgctgatgttgaccaatccgatgatgtaaggaaaactgtgtaccaccactagaatgtaaggaataattctcccattagcgggaatttcatggtgtttcagtgggaaaaagtaaaggtgacagatcactgaggggaaaagccaaaccaaccgctcttcaagaaaaatgaagaactagcccatagagggaaataatgagactccatttcccactggtagcatccaatgacttcaaatctagggctgatgttggctgcttgaagctctaggctaggtacacaaagcaaaagggtgctgaggcactacagcccacactactacctgaacccagtgggattgacgctgggctagccactgggcagtggggtctccacggaggtggtgctctgacaatgaggaactctgtcctcaccggctttgggttgcccatgggacagattgcccctgaataaaaaattatggagagagtcacctgcaagtgccacctatagtgagcagggacctcctcctctacgaaggaacagccagagaaatagcagcagatatgagaagagaagacaattgtaaggtttacttcaacttttagagcaaatgtcccctactgtcaccccctcccctgataaaacagttgctgtaagaaacaagagaagaaatatttttaataaacttttcatttggaataagtttagatttacagaatggttgcaaagataacacagaaagttcctttatatacctcacccaatttcccctatggtaacattttatataattatagtacatttgtcagaacttaagaatcaacactggtatgttactaactgaactacattcattatttggctttgaccagtttgtccactaaattcccttttttgttccaagattcaatgcaggggaccacattgactttagtcctcacatcccctgagtctcccttagtcagtcagtttctcagtctttttccttgtcttccaagaccttggagtttttgaggagtacttggtgttttgaatgaccttcaatttgggcttttctcatgttttccttgtgattagattagggctattggcttttgatggagaatactgcagaggtggaatgagggacattttcatcccattgcatcaggcagtgcatgatatcaacatgatttcccactggtgatattaaccttgatctcctggttaaagtattggttatcaggtttctccgccatgaagttagttgttttttctttccatactctgttctttcgaagagagtctcttaagtccagcgtacacttaagggagggggaacggcagtaagctccacttcccagaggggctttgtctaaatatactattcggaatttttctgtaagaaaatttcttttctgttttctctgtccgatcccaagaaaaatttacttccccaaggatcccatgttccttttattaaagaacggtatttagaaaccgagatctatacattgagtgtgatgttgctactggagtatcgtttctagaacctctcggtagacagagctaggatgtatgtatatgtctactaaccactgtatacacacgtcaatagttatttctgtagctgttctctgtgtgtgtaagctaaacatgagttcatattggtatcctcccccgagtccagtgtcatatggctcattctagactttgctccttgctgatttgtaatgtctctctccagcagtgagaaacttggttctcactatccaccatccatttacttccttgttcaacccccagtatataagtaaagcaatctcataattgttaacctgtatctccacaaagaacaatgttaccaccaagagtacagagtttatatacagttccttttgtcttcagccctacagtacccagtcaaaatattgttttccaaagttacctagatcagtttcttgttttcctccagcccctcagtgattccaactaacatatgtaatacagttaaattcactcatcagtctacattccatcttggatctcttgtcacataggtttattttctgaatatgcatacactgaagtcacttttatgatgtttagttctttgggtttagacaaacgcattcaccaccgtagttcatagaaaaatggtttcatcaccctaaaattttttgtgcaccctgtttgtagtcaaagttactgctaccattgatctgttttccaatttgatggttttgtcttttccagaatgtatagaagtggaatcaaatactgtgtgggcttttgggtctggcttctttctcttagctaaatgcatttaagattcatccgtgttgttgtgtgcatcgatcactcagtctttttcattgctggatagtatccctttgtacggatgtatcacaatttagccactggccttttccagtttttggtgattataggataaagctgctataagtatttttatgcaggtttttgcatggatggaagctcttaaatacactaaggaaaatacctaagagtgggattgctgggctgtatagtaactatatatagtttataaggaattgtcaaactgttttccaaaatgaagatacaatttttcaccagtttatccactaaatttccttttttgttccaagatccaatgcagaggaccacatcgaatttagtcttttcttttttatttctaatctcagcaaaattcaatgttggcaaaacagaatcagaccatgatgaataaagaaaataaattggagaatggaaaagagcaaaacaactcaaattagtgcatttggttatcagttcataaaacccctccagagaatagatgaagattacagataaatgttatgagagagaaatgatcaacttcatggatagatccaattaatctaatacatattcttacataaaacagtgtctcccaaaggaagaagcagacacaagcaatacaaacaatcataaagtcccttaattgaagtagagaagagaagaccagaattcatcaactgacttaagaactgtttccgaaaataactaagcagtggaagcgtacattctattctaatcaggaaataaaaaagaacatacgaatgcacaaattaataaaaataaaataaaaatgaaggaaacacaaatacacaaaattagaaaagacatgcagagaaaatttaataaaatagtatatagtttgtacaaatctattttgatatattttaaaatgtagataaaataggcaaaatttttaaaaatacatgtttttaaaatttactcataattaaattaaaactctaaatgtagctgtaatcataaaaggaatcttaaaaatgtattaaagtgcttcctttcagaacagcaccagcccaaaggaatttatgggtactttctatttcaaaacttcaagctccagataactcatatgccatttaaattgtacccagaacatattataagaaagaagattcttggttctcttccagatctaatatgactaattcagtaatttgtcaaaacagagaaagagaagttgatcctccatcttatttgtgaatacagatgtaaacattctaagttaaacactaacaaattgactccagaagtggattaatagaaatatacatcatcaccacaatcaggcaaaaccaactccaggattctaaggtgctatggtctgagtgtgtccccaaaaattcatatgttgaaacttaatcaccaatgtgatagctttaagaggtgaagcgcataggaggtgattagggtggagctttcacgaatgggattaatgcccttataaaagggccaaggggaaactagctaggctctttctacccttctgccagagaggacccagcaacaaggcaccatcttgcaagcagagagaactgcctcaccagacaccaaatacaggtgccttgatcttggacttcccagcctccagaactgtaataaaataattttctgttctttataagttacccaatctcagatattttgttatagaagaccaaacaaactaagacgtatggatattagagcttgtggtaatatgactcatcctattattagataaagaagagtatattccatctctacaaaggctgaagtgcattggatagaatgaaaaatctatttaaaatagaacaaaaaaactcttaataaacgtgatatgattgagaatatatgaaatgatatgccaagattgtacttgcaggtgaaacattgaatgtatttccactaaatcaaaacatgacatgccttctatctcctgtattttattattttagaagtgatataaaatataataaaaaaatgaaattttgagtcaaaaaattatattgtatgttaatgttcattaattaatacacataattaatctttatacttaagagaagggctcagtgtcacaaatacttggggcattaacttgtgtattatttcctcaaaggttcagtaattttagagagattggcaaatgtaccagatttaaaattgagaggaagactattgaaagtgtagaaatgtccgtgctcttgtatttattcagtgactctgtcacttgtgaatccatcaaatagaaacttttttctcacttctttaaggctgtcattcaactgtcaccttactggacaggcctcccctaattatcacatccaaaataccaccccagatctccagcactttctacctccttgtcctgtgttattacttttctgcataaggactatgattacttgacaccaaatacacttctttttatttattgattgcattgcctaacaaatcctgtgtgaccatcaccatcaaacactagaaagtacatgctatcaggatagtgagtaagccagctctgcagacatctcagagaagactgttatggaccaaggaaacagcaatgatgtccctgaggtgggacagcacccacaatgatcaagaaaaaggctgggggacaacgtgcctagcgtgagccagatagagatttgtggaacatgaggtcacagaagagccagcagcaagtttatgtaggaccttgtaagcaatgctgagggatttagaacttaatctagatgagatgggaagtgtgttcatttgcttgtgttttcatttgaggaaaagtaggcagaaatcaagagtgaagtttaatcagataattcgtgacatgtctgtgtttcatctaaatggagacgttcaaaagacaattggatacagcagtctcaagtggaggaaagaggatgggattgagagataaattttggagttatcagcttttagatataaaaccacaagaatagattaagtcaagaggaatgaatgtgaccagagaagaggtcccaggactgagccatgagtcacttctcccttttgatagggatgagaaagtggcatcatcaagggaagcagaaaaggagggaacccaggagcacgtggtgcctggaagtatctcaggggaagagagagtgattaactgccctgaagcctgtgaacacatttagtgagatgaaaacaagcaaatgacctgggatttggccacgcagaggttattggcagcctaacgagaaatttcggtgaagtggtctgattggagttgattccggagagaatgcaaggaggctgtagttagagccactacacaaaactctcccagagaaacttggctataggagtttgtagagaagcaggacggtagctgagaagtctgcatggtctatggaggttcttgtaagatggaagatatggtgttcttatatgctgaagggaatgagccagcagatgggaaaatgatcatctaagagagggaagggaagcagttgtagaagcaatcctcctaagtaggcaagaagacctgagattcagggcacaaatggaggtggacacctgggatcaggaaacagacagttcacctctcacatcagaaaaaaaagtgggatgtatgggtagaggtgcaggttggctggcagattaggaggtagaatatgtgggcatcttgcttctcttctttgaggaaaaaaaaaggagagaggaaaagtgaaatcgctcttagggagcttgaattgactaaagaaacataggatcattcacccatttgatatttacaattctttgtttaaaacgaactgagttggcattgttctgagctcttctctagccatgctgctttgcattcagacaggcatgacgtttgttcttaaatgtaagtttagtaggtgatgttgtctccatttcacaaatgtcattactgagcggagagaggtgaatgagcctgtccaagtcccattcatactagtaaaacttggttttcgactcctattcagattgtactttgtataaccaaataccataggagtgttgtccatatatgcttttgatttttgtgtcatttattgttttaatactacccaattttcttacccagggaatagagagtagactcagaccactcagagtaatgatactgtgtatcactactgccatgttcaactttcctttggattactttatgcagggcaaccgtaagatatgacacaggcagaaggagccaaaccaccatttataacattactctaaattacatgttctaaatcactggctttgaaataaattgttggtgttaaattcatggataggagatctctatatatggaaatccagttaatcccaagtgcccactacatcatgattctggctcctttccagtacattatcttcttccatcccagtgaatgtgtctctttctacatcaaatagtccagaccaatctgggacgcagatatctgaggctctataagattcctctttatggtttccttggggtcagaaaaaaagaactcatttactgatgggtactaagcaatgaatattaatcaaaaaatcatgagatatatttacattaaacttcattattttcatttaaaaaatttcttatatacagcattttttacagcttaaatgaaaacaaaagttgcacatctatacatatacttttcacatcccaaagagtgtcagaggaggagttatgtagtttatgggtcaggatgagaatgatgataatgatcctaagtactggaattgatttttagttataaaaaaaatgcctgggctgcagggtatatactcaggatagatcacaggcttcacagtaaaaatatacaggatgagacaaaggctttaaggtaaaaagaggataaggatcatttctaggcaacgatgcacataatctcacctcctttgcacggcatcaccttagtgctcacgtggccatttaaccagttacactgaatatgggcaataatctggtttccagaaagtatccatccactaaaacgtgcacccttaataatgtccttatcataacctttcaatttaagtatgtcagatttcttttcatcccaacctagtactaatagaaaaaaagtaagaggccagagattttaaagatgaagactagagccaggatgattgggagtgagtttaagtgaaaggcggtggtcgattagagtttgacgctctgctctgggtggtcttcacggcagtgcctataagtggctttcagaatatttcttttagcagcaaaagctctttaaattttgattttacacagatcctcaaaatagaacatagaaaaaaagcagtattcatcattttttttagttcaaatctatatcactaacaaaagaaggaagctatttttataaatagaaatatttgaaatcagagcttaagatcgagttgtggcaaccaatttgtctccatattttggttgattgtgcagaaaaatccaaaatgacatggaaaagtcattgtatataacaggtctgtctgcttgtttttgacatgttgagtcaacaagctcatgacagtcttcaataaaataggtccagggggctgaatgaggagcagcagaacttgatttattaacaatatttaaaatttgctcacatttcttatttcttttttaaaaaaaagaaagttaaataacaagcacctaaaacttacaagaaaatcagtgacataataatatcattataggacctgttatcacacaaccgatgggcacacaatgcttaacacatgtggcatgaggtacacaggatgcaagaatgtaccacctatcacagtcatactcaagtgggcttgtgtgggtttgatcttctttttttttttgagacggagtctcactctgtcgcccaggctggagtgcagtggcactatctcggctcaccgcaagctccgcctcctggcttcatgccattctcctgtctcagcctcctgagtagctgggactacaggtgcccgccaccacgcagggccaattttttttcttttttttcttttttttttttttttttttttttttttggtatttttagtagagacagggtttcaccgtgttagccaggatggtctcgatctcctgatctcatgatccacccgcctcggcctcccaaagtgctgtgattacaggcgtgagccactgcgcctggcctgatcttctttttaaactcagttccaagacgctacatactttaccaaagacatgtctaaggcgttttcacatataagcagatagatggtaggcactgtctcatgcagaggaatgaggagacacgggagcaaaaattaatatgctcgtttacattttgttgaatttggcatcaaacagttttcacctggtgtgtaggttttgttataaattacaagtgacccttgaacgacaagggtttaaactgcgtgggtccacttacaggtggattttctttcgcctctgccacccctgagacagcaagaccaacccctcctcttcctcctcctcagcctacccaacattgggtaggtaaactgagcttgcatgaaacgctgtccactgcagtgtgtttgaaatcagagaaaggaaggaaatgagaagaaaggaaggagaaaaaaccagttccaccaggaccttctaagacacgaacttcatgatgagccacttccacttaatgaatagtaaatacattttctcttgcttacgattttcttaattacatttctttttttctagcttactttaaaatacagtatataatacatatacatagtatgtgttgtttactttatcagtaaggctttgggtcaacagtaggctattagtagttcagttttgggggagtcaagaagaatatgcagatttttgactgtgagaggagctggtgcccctaaccaaccctgccttgttcaaaggtcaactgtagtttgaaaaagtcaagtcgttaaaaaagtgaaacacagccgggcgcagtggctcacgcctgtaatcccagcactttgggaggctgaggagggcggattgcctgaggtgaggaggttgtgaccagcctggccaatgtggtgaaaccccatctctactaaaaatacaaacaaaaattagctgggtttggtggcatgcgcctgtaatcccagctactcgggaggctgagtcaggggaattgtttgaaccagggaatggaggttgcagtgagccgagattacgccactgcactccagcctgggtgacaaagcgagactctgtctcagacaaacaaacaaacaaaaagaaacgtaagtcagacacttggaaaacagtctccatcaaatagctaaaacagcctctggcaggaagatttggtgacggaatttctacctcaaggccagaatcagctcatgtgccctcagctgggggtggaggtgggtctgacctctgaaggatacatctttctttacctctcattattctgcgcaccacttgagctgtgcagctgcgaacaagagcaaatccaaggtaagccaggaaccatgtgagaagagaaataccctggacctacaacttctaggttttcctactcacaggaaaaaaaaaaaaaaaaaaaagtcttaggcaagactcacagagaaaagttgaagaagaagaggaagaagaagaagaggaggaagaggaagaagaagaagaagaagaggaagaagctttgatgcagccagaacaagaatctaagttcgactcctaatcaaatgccaacacaatcatattggacaggaaattgcttcagtaactcatcatcatgtttacatgaacactctacttgtttaagtttgggtttcctcgaaagcaaagcctgagacaagggaattcatgtgggaggtgatcccaggaagcaagaatgagagagcaggaagagtgacaacacagggaaggagaaaaaaacagttccaccaggaccttctgacacaagcaaaatgcttctcgaatggcccaccagcatgacggcaactggagtgttatccatgcctcctgcccctcatgatgctgggatgcctccagtgatgctggcttagctgcacctgccaggtcagtctagggcagaaagagaaaagccttcctcagtgctcttaaggtaggtaaaccgagcttgcatgaaacgctgtccacagcagcttggttgaaattagagatgggccaaggagttgtgctggggacaccagacatatctgttgccccatccaattctacatgagtcctagagagccccagagcccatcaactgtgctcccccattataagtcagtaatttgtcaccaagtctgttttggttttggtggttcttgacagaggcacgcacccattcattcattccttagttctgatttgaatgtctgctatgtgcctggcactatccaaggcactagggatgcagcaatgaacaaaacaaacaagtccttgtcattatggaggaagataaagaaataaacaaatgaaatatatagtttgtcgtatcgtgataagtaccaggaagaaaaataaggcagaaaaggcgtcaaaggggctgctctaacggtgcttcaggaaggtgggaagatgaacagaagacacctggtatttcatccggcttgaatctgtttaacgtagcaaattacccctatctggctgaccttcagaaaaccagtaaacaagtttgtagaaaagtatacctctgtgttgtctcatataaagatactgactgatattcaggcagattctccccacagaaattggtataatcctgagtgtgaatccaagttgcagattctccaaacaaagccaagaagtcacatcttcagccctctgagccttttgtgcatttttgaaattagaacttcagcttcatgcacaatattctggtatcaaaggccaccctgcaaaaaatttttaaaatactatctcacatattagttaattatcagtgaacatcaagattctactctgtgctgaagttgagcctggttgctgccttcagtaaaagccacaagtaacttgtggccagatgacccaataagagtaaacaataccaaagagagcacaattttgcttttttttaaatacagattgactaaaagtaagttctaaaaaatttgaacacaggcagattgtacaacaaaggtttctcaaaagagctgggttatgagaaggatcttaaagaatggatcaattctagcagtggggggtaatgattgcatattttgttagtcaggcctggcatacatggcagtcagggaggtctgcagcctggttgatggcttctcttatgaaaagctgcagacattgtgtaagattgtggtttggtaggtcttgagaagccatccaacatttactcaccaagactggttgagcacctcatctaccccaggctgaagatgtgacttcttgacttgctttggagaatctgcatcttggattcgcactgaggattacatcaatttctatgggtagaatctgcctgaatatcagccggtatctttaaatgagacaatacaggcactgtgctgagacatggggaaatcacctgtagccaaggggcaggggctgagacaggctgcgagtgaggaaaacagagggtgcttgtagggtgggagggatcaggaagtctgcctgggtcacaccagcgtgacacgagggtaaggacaaaactcaaagtgtggcagtggaaatggaaaggaaaagagaatattagtcattctacgtaaaaaagcagtcaacagaattgatatctgactgtccatggggattgaggaagatgtacactgaccataattcattgtttaagcctgagagaatattggtacaattgttagaaacataaagcgatcacttcaaggatgactcaggaggaaataagcgcacattactttgaagccatacttccatagagctaacaccgtgcccggaactaaggtgactacctagaataaatcaccacgtattctcacaacaaccaaaggaaccaagggaacccagggaatttcacagttgccatctccattttacagatgaggaaacctgagctcgaggaaaggaacttaatgtatatcattcagctagacagacaaggggagggtgggattctatgcaaagttcatctcattcaaaagcctgcattctctaagaactaccactgccgcagaggttaaaaaactaatgttatggccgggcgcggtggctcacgcttgtaatcccagcactttgggaggccgaggcgggtggatcacgaggtcaggagatcgagaccacggtgaaaccccgtctcttctaaaaatacaaaaaaattagccgggcgtggtggcgggcgcctgtagtcccagctactcagagaggctgaggcaggagaatggtgtgaacccgggaggcggagcttgcagcgagccgagactgtgccactgcactccagcctgggtgacagagcgagactccgtctcaaaaaaaaaaaaaaagaaaactaatgttattttctgcctataaagtaatttaatatagctagaaattattaacattaaatatttatatttttctgcatgcaatagtaacacatgtgacttgtaaaaatgctctaatatgaaagataatgtaaagtgtaaaaaattgcaataacctccttccctcagaaaatcattataagtagcagtgaaatattattatagattaaagtctctattaattctagtttttaagtaaatcttattaccttactgctacaccttgtttctttgtataaaagatcatccacttaggtctttgaaatgagtatttcacatttatcatggcatagccttaggtacgtgtcaatgattcagttcttaatgagggaaaggaatcttcctctgagttcccattctctggataatctaacaatctagatttaactcatttctaccaatttccacatgttcagcctgtaagtcaaagaattagcatcataaattctgatcttgctcactgggcatagatgggcagttatttattcatatctgaatttgtatgaaccttcatgatcaactttctaattattatcagcctatatccctcgacttacaatctcaggaaaaaaaaaactgattcagattgaaaataccaggtataaggaatgtgttgacatgaaaactatgaatgtcactagggagaattcagggttattttcttagtggtgaactcaccttcataggataaaagggtaaaaaaatgcattgggtaaaaaagttctaagcttcattcaacccatactttatatcagtcagtgcacaggggatgtggcagcgaatacaatgaacagtcctgtgcaggtgaagcttgcttttcatggggaaagacaagtgaagaagcatggtattgacaaattgtgatcatgcaatgaaggaaacagtcagcagagaaaatagaacgagtcaggaaagtctctttagacaaatgaccagaaatagttccttttagctgagacctgaagcatacgaacaagtttggtcttccacttatcacccactcacttcttcaatctccatcttgactgatcctgatctgttctccattcctgcaacaatgcagctgaaattcaccagatcaaatcatgtctccagagcgcctggagtcactttaaatccatgagcacaaatgtcaaaggagcaaccctagaaatccctagacactctagaaatcctactcagccccccaaataaagagtgtgctttctcactcaacttgtcaaggtcctagcagaaatagagtacaacatagatgtctcagaagactttaatgaaaaaacctctcaaagagatgtgggcaaaattaagagaaacactagggatgttagggcactcagagatgagcgggagtgggcagttgttccatccttaaatctgaacaggcaagaggagaaggaagcagtattactgaatcgtggagagctctggatccatggataaaacatcatctggtaggagcaccagttttggagggacacagccattgacatggaggaaccagggaaaaaacacctagacttttttctctcccaccccagtctcccactggtgcctctgttgacaaatcccaccaagggccagccaacaaggacattaacatgatgccgtcagtgggggcaggcttccaaggcatagagcagggcaaaggatggagatagggatgggggataaacagaaaacaaggaccattgcactccaagatgccaatttcatgctttctccttttgcctgaaaacctcataaccatggtatggtctctttggaaatcggttcagcagttttctataaatgtaaacataaatttaccacatgacccactgatcctcttcccaagtagaatctttcctttcccaagaaagatgaaagatgaaaatgaatgttcactcaaaatctgtacatgagtgtccagagtgactttattcagaatcctccaaagctggaaataacccaaatcgatacaatagtattgcactcaagcaatacacactgatgaactactgatacacgtgaaatgcagatgaatttcaaatgctccatactatacaacatttatgctatacaacatttattatacaacatcaaatgctccctttcatacaacattctcaaaaaggcagaataaggatattaatcagctcggtgactgcctggaggcccaaggggatgtgggatgctgaagggtcacccccttggttattccatttttcctcaagaccccgagggattgccccttttgcataagcacattttggggtgtggctttcttatccaaactgcctgggtctggggagaggagaggagttgactacaaaggggcacaagggaattggggcaggggggtgatgacactgttcgatatactgattgtagcaaaaactgtgtgtgtgtgtgtgtgtgtgtgtgtttgtgtgtgtgttaaaccttatgaaactctgcatgaaaaggggtgaattttaacagatgtaaataataataaacctgacaacaacaagaaagccacccccataccatcccgcccactctcagatgatgattttactttttatgtcaatgataaaatggaatacatcttgagaaggctgttttatagtctcatcaccaagttctgaaaacccttaggatccgtaatttcacctgtccttcctggcattcaagaggaagaagtgacttcctgttgattcgaaaggcaaatgcttcttcaggtgttctgtgtcagggataaaactctttctccttcccatcttaggttcgtgactgatgctcctatcacaaaagacaaattaacaaaaaaagtcatacgaatgtattgactataaattttatgtgacacagaaatgaagactcaatgagacagggaaacctgtgttttcttatgctgagtgtgatgaagaagtggatggtcttggagaagtatgattggacaaagggggtagagtctaatggtgattaactggaaggagtgtagcaaggactatttgttaagattcttctgtgtccctgcatcttccgggatacagatgtttctttcctctggatatagggaaggcacctctcacatgaggtgccttgaggagtttctttcctctggatataaggaaggcacctctcacatgaactgcttcaggggagaaggttgaaggtgaccttctggcttctgctgttttctcaaatgccacatttggtgccatgttttgggttagtgtgtcctgtacactgtcgcatgtactcctgtctccaattagtcctccctttcccatctcagtccctccctttaccagattatctccttcaatatgtagacaagtctctctcgattccatccccaccccaatttctgccccatctctctgccccttccacaacaaatatcttaagtacttatctactcaatgctttctccacttcctcatttctaatccactctttaaaataattctttaaaatttccaatataaaggaaatgataaataatagtataatcattattcatgttttcaatacccagatttcacagatgttaacacttagctatatttgctcaagatccttatctttttgtttttaagaaataaaacattacctgtataattgaatccccttttggactccttcccaatcctattatcccctcattccccagaggtgacctctattctgaatttggtatgtaccattccctccatggccttgtattttaccacatccacttatgtccagaaatgacatgtagaattgtatagcgtgcatttaaacttgatacaactagtatcttatcgtactttgtcacttacgtcttcaattactttttgcatcccatttctttctttggctttatttattcatttatttattttgctggaatatgttctttcataattctttcaaaaagagtgtgtggggggataaacatggttatttcttgcatgtcagaaaaattacatatttcctgcagacttaaattatactttttgaatacagaatcatattttcaggttactttcttcagatgattaaacgtattgctcaattgtctttctgtagccaatgctgccagtgacatatgatctgatcctaagttcacattggatttctctctctctgtctgtctctctctttctctctctctgcatgtgtgtgttgtgtgtgttggcctttccttctcagctttagatatctttctctttgtacaggtgagagttctttttcaccttatactactctttacatttgaagacatttctttccttaatttggggaaattataccctattattgcttaagaatttcttcccctgaatttcactattccttccttctgaaatgcctattagtttgacattggtcatcctggagctgtccttccttctctttacttttttactaaacatttcatgcctgtggccttgtggtctgtcaggattcttgggatctattccccattttcacaaattctgctttccagcccatccattaaatagaatattttttggtttttgttttttaaattttgatgaggttttcagttccaagatctctgtttcatccttcaatgaacagaatatcctcctacatttcttggaaaaccattgccctgttcatctcccattaattctgttttctcaggctggttgcacctggcagctgtcttcaggctgttggttttccttaagtgtgtgatccccaagtgcctacatgagaccatggtacaaatgcctgatttcagccttcttcataaaggaaacagtggggcccgctgccccatggaaggtaccggtagctgttcttccacatggatgagttctctgtttgttctgggtgttaccatcatgttgatgctgggtctccgtcccaggcaatcctggccactctcttgtactctctgcctaccccaaaattccatgggggcctgaggggattcaggatgctgaagggtcacccccttggttgttccatccttccccaagaacctctggattgccccttttgcacataaccacatttgggggtgtggctttcttatccaaactgaactcatgttcttttcccatctgtcagggattccacacagttttagctaaaaggggcgctgcttttttttttctttctgaactatgatgcatttgttcagtgctcttttctacaatgtctgtggattcaaacaaaaggcgaagggctgaagcatgtgtgcaactattgtaaatcctaattctctacatttattttataagggaccccctaacaaattgtcctattacagtgaaaacgtttttttggccgggcgcggtggctcacgcctgtaatcccagcactttgggaggccaaggcgggcagatcacaaggtgaggagatcgagactatcctggtcaacatggtgaaatcccgtctctactaaaaaaaatacaaaaattagctgggcgtggtggtgcatgcctgtagttccagctgcctgggaggctgaggcaggagaatcagttgaacccaggaggcggaggttgcaataagcagagatcgcaccgctgtactctagcctggtgaccgagtgagactctgtctcaaacaaaaaaaaaagttttttctactggaccattttagcattccacagtgagtgtgtggtgtgtgtgtatctttcatccttcacctttctcggttagcacttccagaactatttcagataactgtagtcagggcaggtggcctgcttaatcctcttttctcgtcattctggcccctccccatcgttcacaaaaaataaggagacttccaactgctgcagtcctctgcgcccctgaatagagctcattagattaaggagagacccctgacacaggttgcatgcatgtgcatcagggcctctttttctagaaatttgaagtaacaatcacacagatacataattaaaaattgcaataagtaaaatgaagatcaatgtcaaggagctgtaagaggctgagttctgaaggacttcacctggttgaagagaagagaaaggttccaggcaggaagagtacaggtgagggccatgggagaggagagcacatgccaccactaaggggctgaaggaagtccaggaggtctggtgggtggaatcccaggaagaataccttcctcctcttcctcctcctcctcctcctcctcaataccactgagtgtctgtaccctacattgccccaaagaccttacaggtctcagcccatttaagtaaggaagaagaactgaagaggaaccataatctgtaggacattgataccacattaaagacctggttctcttgcataagaacaaaaggaattaattacaggtataaagaatggtcatgtgacaagatgtgcacattaaaggattctgaccttcagagaatgggaagaagttgggtgagatgggaagcaggaagatcactcatgccactatttcaggggcagtaccctgaactactcctgactttaaggagaatgccctgttgttacaaaactaaatgtggtaggtgattgttcatttcagataattctgttaaccctgtgaatgaagggcggttatattgctagattactcagtcttttgtttatatttgaagtcaggcatggaattgaattctataaaattgactttttttgaaatgattttatttgtaactaaaagaaattacaaatatgttaaaatacatttcttataaatctagggggaacctccttggtcatgtggtatattttatttgctgagatgagagaacttctaaaatctgtattaataagagaaactgataaacagttttctttggagtggcattctctgtccagtttcattttgaatgtaatgcaagcttttttttttttttttttttttgagttggagtctctctctgtcacccagcctggagtgcagtggcacgatctcggctcactgcagcctccaactcccaggttcactcgattctcctgcctcagcctcccgagtagctgggactacaggcacataccactacatccacccagctgattctttttttttttgtattttagtagagatggggtttcaccatgttggccagactggtctcgaacttctgagctcatgatccgcccaccttggcctcccaaagtgctgggattataggcgtgagccaccacgcccagcccggtgctagatttttaaaacagattgggttgcttaccttctttctctctgcccagtagcaatttaaataataaaggaattttattgaatcctgaaaagaatttatccatgaaaccacctaggtgcagacattttggcaggagggaaaatgattctttgaaaactttgcttatttttccccttattatttatcttattttcctttaataagatttgaagtctttgtaagttgcccatatcttccagctttttgaaatgattaacaaagactggaaaataaatttggaaaatacattattctttccttagaatcttctacatatataaattccttttctcagtcttaatttacccttattcttttttccttgattaatctttctagagctgtctatctcattattgttttcagagaagccagttcttagaattatgttatgcagttttttctatgtgaaatgtattaatttctgcttaccttcctccagtctccttattgaagttatttttctaccatcttgagttgaatatttatttacattcatttgtgtatatatatatatgtgtgtatatatatatgtgtgtgtatatatatatatatatatataattcattcatttaaaactatgcatcttcctgtggttactgctgccttgaccatatcttatattttgacatacactgtatttaatagccttttaaaatctaaagttgcctgctgatttcttaatgcatagacaatatcaattttattactctgacatttcttgatttctaatccccacagttttaatgcaggcttaaaataccatgtattattattattattagtagtagtagtagtagtagtagtagtattttctttttttatttctttgagatggagtctcactcagtcgcccaggctggagtgcagtggcgtgatctcagctcactgcaagctccgcctcctgggttcacgccattctcctgcctcagcctcccaagtagttgagactacaggcacccgccaccaagcccggctaattttttgtatttttaatagagatggggtttcaccgtgttagccaggagtctcgatctcctgatctcgtgatctgcccgtcttggcctcccaaagtgctgggattacaggcataagccactgcacccggcttaaaaataccatgtattataaggcccttcactcttctgccttgagagtaaagcagactatgcttctcctgtcttctttttcttgcctttagtttcatcacgttacacagatcatgtcttggtgtccacttcacaagacattggttaggagtcatcatgccctcaatgtcccagctcagaggtaaaacatcccttgtagagtaatatccagacacacctttttctcatcagttgctcttaaagtgtactgaaacccatgattaaaataggtacttttttttttcaaggtttcaatactcaatattctaagaatgaagtgacatcaggaaagtaattgctatggtgcaagatgttgaaagggtgaataataaaaatcagatggatttcttggaaggaaaatacgtttacagttcaaacacagggcctgggtggagatacagaaccaggggaagaaattaaaacatatgagagtcaagggtaacggtcagaacagctcggaatgtgagactgatggagcatgagagtccagcaggactggagggccagaaggacagagtttcactctgtggtaggcccattaaaggtcttgtttacctgaagatactacaataattgaaattgcatattaattggaaattgcatattaataagtccatttaagcctgtttgctttactctgtgtttgcttatatttgcattaccacttggcagcgtctgggtctttatgatgcatcttttgcagctggataagcttgaatctataaaagttgtgaataaaaatttctcaaacataacgaggggatagtcctcagccactggaataggtagccatgcccctaatccagaaaacactcattcttggatgcattctgccaatttgacatcttttactctccgattttgtggtagtgctctccaaagtggcctttatcaattcagaccattcctatatatgcctgctgcttcttcagtaaagaggtgaatgctaattcccctgtccttggccttagtgacttgcttaacccacagaatgcagtagaagcaggatttctgtgacttcccaggctgagtcataagaagctttgcagtttccacctgagtctcttggattgctcactcctgtaaaacatccaccgtgatataaggagcccgtgccacatggaaatgccatgtgtatgtgtgcctgtcctcaacctcggctgaattctcatctggcatcaactgccagcctttgagttggacttcttggccattcaactcagttggaccttcagttgagtgcagcttcatctgatatttgtctgcaaccatgtaagcgtcatcaaatgagaaaccagccaaacccaatcaatgcatagaaccatgagaaataataataaacattttataccacacaggtttggggtagttttttttacatacacaacgatacataaccagaataatcatctatgtttcaatgacccaaataagtatctttctgagggatgcaaacatttcttacttctttggctatataatgtattcttccaggttaaagtcaaaccatgcttacttggagcaattataccttcaatatttctgctttgatccattattatgctatttattgctcaaacagcaatatcatttttagattattattgaagatgaagataccttatttttgttcccattgatcacctaatggtaattatggtgaaactccaggctctgattttagtaaactgctgaatttactgttcagttgaattgctgctcaactcaacaggtatttatcaactgtcttttatgcactgtgattgtggctgtacaacttgcaaaatgaatgtatttctgttctcaaggaccctttagttcaggagagaagataactcagatacaaaaacattgtaattcaaggaagaatgtggtgggtcctaagtgtgaggagcacatgtaaagtcacattagggctcaagagaggaacaagggaagtatcattcaggagacagcataggagaggagaaagtagagaaagacctagtttgaatcccagatctgccactaacctgaacaagctatttaaacttccaaatttataatatagggaaaaagacactacattagcaaacattcttttagttaggttttgttttttgttttttttttttttttgagcaactgttttacagaattgtgagaattagataaaataagggaaagaaactagtggtaatctcaaaaaaaggtactttattgatggtggctggtgttatcatcattattatcacccctttcaatgtttaattagtggtttcataaaagacttaatggagagatggcatataagctgagactttaaaaatgttcttacctcacaccatatacaaaaattaactcaaaatggatcaaaggcctaaaagcaatagccaaaactatacatttattaggaaaaaaacataatttttgtgaccttttgtaaatctctgtgaccttagatttaacaatggattctcagatatgacaccaacagcacaagcaacaaaagaaaaaaatagatatattaaacttgatcgaaattaaaactttatgattcaaagggcactgtcaagaaagtaaaaacaaaatcccacagaatagaagaaattattttcaaatgatttatatgatgagattcatatctaaaatatgaataattaaaactcaataataaaagattcagccaattaaatacaggtaaagtgtctaaataaacatttttttccaaaaatatatacaaatgtccaacaagcacatgcaaaaatatttgccatcattggtcttcaggaaaatgaaaatcaactacaatgagatactactttacacccactagaatgactgtcatcaaaaagtaaggtgataacaagtattgatgaggaaattagaaccctcatacacgactggtaggagcataaaatggtgcagacgttttagaaaacagacttgcagttcctcaaatggttaaacagagttaccatatgacccaacaattccactccttgggatatacccaaaagaactgaaaacatgtatacgaataaaaatttgtacatgaatgtttatagcagtgttattcacaatatttaaaaggtggaagcaaccgaaatgcccatcaactaatgaatgaataaataaaatgtggtctaccataccatggaatattattaggctacaaaaaagaatgaggtactgatacatgccataatatggatataccttgaaattattatgtgaagtgaaagaagccagccaaaagaccatatattatgtaattcgatttatagaaaatgtccaaaataggcaaacctgtagagatagaaatcaggttagtggtttcctagagatgggggaatcagaagtttggtgatacttaaagagtatggggtttctttacaaagtgtttaaaatgctccataattgattatagtgatgactgcacaagtctgtgaacatacacaaaaaacattgaattgtacactttaggtgtgaatcatatagtttagaggtgaatcatttagaggtgaatcatatagtgagtgatatctcaataaagctgtaactgaaaaatgatgtcaaatacctcaatatgtgggggtaagcagtagtgagaggaggtgggacaccagggatccagttagagaccatatgtgcaatgagtagaggtgagacattatcaagcagaatatatttgtaggtcaaaaagttggaaattagcctcaggcaaggcaatatgatagaacacagtgagagccacacactcgttaaagactgaacctacaactggcgcagcaaaaaacattggggacctgaaggagtgtagtgacaataggaatggaaaggaggggacacacctaggaaatactgtctgccattcttgaattaataggacattaattatgtctgttgaatggggcctaaagtgtataggaaacccaggtatgattgtatggttttgaatctgaaaacaggaaaaatgatatttaatacaatgcaaaagtcaggagaagatgctgctttggcaaagtggggtagtaaagtcagtttggacagacagactggaagtggagaaagtgagagagagatggacacaggcagaccgctgaaaacactcacatgctcagtctgtgaaatggaccaacaatacttcattctcacagggctttttaaagttgttgtttggtttggtaggtaactcggggggtgggtggggggtgggagagactggcatttattgtttaccatgtggtatggtttgaatatttttcccctccaaatcgcatgttgaagtttgatctccagtgttggaagcggggccttgtgggaggtgttgagccatgtaggctgatccctcatgaatggcttggtgctgtcccggcggtacggagtgagttctctctctcttagtttccatgagagctggttgtttaaaaaagcctgaaacctcctcccctctcgttgctccctctctcaccataagacacacctcttccccttccctttccgccatgatcaaaagctcccggaagccctcatcagaagaagatgcgggtgccatgcttcttgtacagcctgcagaatcatgagccaaataaacctcttttctttataaattacccagtctcaggtattcctttataccagtacaaaaggaactcatatactatgcatccagcattcccctaagttgtttaacttttttttttttaatatgcattgttttattttctcacagcagccccatggagtacatattactttcattatcctctgattttgaaaccagatctatttggttaatgattatttctattgtcctttgttgtaaaatcaacgaggcagcatgtctgagagcctagcctagggtctggcaatcatagttgctcaacaaatacaaattttcttccccatacctgcgtcaacctgccctccattgttgctgattttgtttaaaagccaggctttatatttactaaccagaatctccctgctccttcacctctttctttggcgcaatgcagtcggtacctcaaagcttcatttctctgcatgggtaacttccttatctctgatcactccattccttgtacatctgcacctcccctgttcctttcagtccctcttactgactccaccaatatctctttcagctttggctgaaccagtggggtttaataaagacaaatgtgtattggatttgaggctacggttaagtgcttgttgggaatttggtgaggcccacccacacacccatctcatttataactaacgtcactggaatcaagactgctaaaaacagagagattatgatcccccagcaccctttccaactaatctcaaacacgagagaggaaatggcagaaggctcatctctgtgagattttacaacagtaaattgtagctcatcagggccaattcctcaagctatttgctgtaatctaaaccagaatttctcatctccccttttatgattccatttgggggctctgtgatgaagttgagcagcatgtccatatgttatcatcctaatgaaaataataagagccgagtgattattaatcacttggccttatcatccattaaaggaaagtcttgttaaccaaaaggaatatgttttggtccggaattccaaagataaaaacccaacagagatgacagaactgaactaaaaattcaattgcattgaaatttttaaaatgagcagtatcttgtcaatgacttctttaattaaacattcatggagtttgaaataaaatattcagccctcgatgtggttgagtgtggttccttttttgttcttgtcattctcttagtttaacgtgggttctggaattccagaaaaaatgaagtagctttaatcagctttgtaaacagtgttcagaaattattaggcctcatagaaaccattcataaacacctagttgtattcagtttaaagtttttcataaaaggaaaacaatgtataaaccattttagaaacgtgctttgattagaagcctggtagatgagttagagaataattgtaagtgattttacaatgctaatttccttaggcaagggctgaaagcagggcatattgatttcatagcaagaaaacctcttggttagaaacaaattatcagagcaaagacatgtaggcagcacacttctgtaacctctagttcaccaccaactaaaataggcatttgggcaaaggaaagttacatggaaaatagttttagtatctatatattattttgttttgcttgttattttaatggagagtacattgtatttgaatcagtatttctcaaaatgagttccacagagcacaggtataatgtaataattcatagggggaaatgtttgggacaatgtacagtcaataatgtttgggaaactgttacattctttactcttcattgaatataccattcacattcacatggtagggactttgagaagtctttcagcagaaaaaacttccaagtttgaattttaactcaagttctctgaaacttatttgacagagaaaatgtgtgtccttgtaataactattaaaatgttctggaaatagtgtgtgttccacaaagcccatttagggaaacatctgcccccccagcatgctatgattgaagaaagtgtgcagaagtggtccatgtacccacagccaggcacggtattcatcctgtgacagtgacctaattttcaggcacagcaacttagggaggtacaatgatgggcacatagtaggcacttactattggttccatgggataaaattcaagttaataaagctattgaaacaacccagactactgactggccacagcccaactgttgctttcattgggacacatgtaaactgtgttcaaattggtgagctggccaccacctgacacgaatgggctttgtccccaaatctctgagacaccagcaatttcagcgagctctacattatgttgaagtcctagacagctagactagaagataaacaaatcatagagctagaggatgatcaatgcaacacttaatcatgctcagccttgggcattctcccccatttggacacacgtttgatcccttcctggtccactgcatagtggggaaagagcttgtgcttaggcatcaaacaaaacctaactctgagttcaggttttggtatttataatcttgcaagctccagcaagtgactgacttactctgagcctcactctcttcatctggtaaacgtgagtaaaaacagaacctatgccaggcgcagtggctcacgcctgtaatcccagcactttgggaggccgaggcgggtggatcacctgaggtcaagagttcaagacaagcctggccaacatggaaaaatcccacctctactaaaaatacaaaacttagccaggcgtggtggcacacacctgtaatcccggctactcaggaggttgaagcaggagaatcacttgaacccaggaggcggaagttgcagtgagccgagatcgcgccattgccctccagcgtgggcgacaagagtgaaactccgtctcaaaaaaaaaaaaaaaaaaaaaaacagaacctacttcataaagttgtgaggaataaaaattaaaaagaccacatgtgtatgaaataaaaaacagtgcccagaagacaaatggccaggcaattttaggtgatgctgaccacaatgaagatgacgactctttggctgggaataccatgaaatcagaagttcacagtggctctgagacctagtgagaatattaaccaaacaggctatatagaatttccagccaatatcacatggcattgcaaaaatttccactccttccattgacagggactacaagatacgtagaggcccagagaaagggagaatagcaagaggaaagagaataacaagaagtgaagcagtgctcagtcaggcctcctagggcttccagatcatccatgagggggaaggttgaagctttcacactgaaacaagaatttgtccccaggtacagaagtgtgccaggttgtacagcctgagccctgccccaaacagtaaggctggattgggtcacctctgggatgctgagataacaaataatgtccaggtgcatttaaaaggagagatctaaacattagcaagccacagagcagggactatccttccccagtagatctgcaggaacatgaaaatgaagtacatattcgctggaactttgacccagtgccccgtatggaatcaagtgaactgggctggccccttggagagagcttttagctaagtgaggtcagtgtaagaggccaagaagaaagggtaggcatgtgtgccctgaaaagcagagtgtgtgtgagagtgagagtgtgagagtgagcagtggagaccacaaagctcacaccagtggcagaataggcacccagcgtgtgcttccttgggacagggtggagtgggagccgacttgcttccagtctcagcttacatgggcatattagagaaggaagagcatccgaacgtgaaaaaaaaaagagaaaaacaggactaggccttcccccagaagtctggctcagactttcacttactcattcattcattcatttcctcaacaaatatttactgaataccacaaacggttctaggctctgtgactatatcagccaatacaacaattacctaaaacccttccttttgtagagcttacattctgttgggtgtgaaaaatcaacgataaacataacaaatatgtatatgtatattatatattgtatgtatattatattttgcattagatggtgacacaggttatggaaaaacaaataagcatgataagggagattgagaaatgtagttagccactttaaataaggtagtaagcatggacctccctgaaaggcaacgtctgagcaaagacttgaaggagctgaaacagcaggccatgtagatatggggaagaacattcctggcatagggaacaaaggacaaaagtcttgggtccagagaatccctagaggttatagggatgctctgtaatagggtcacctattatagagggatgctgtattataaggatgctctataatataacctagaggttatagggtgtttctcaatgtctactacctaggatccaaactaaagaagggaagtcaggggaacaagatggaccaggccttcagctccagtaaaatgtcctggccctgaccacacccatagcactcctcccagggcggggataggggtagggtggtaaggcgccgggagactagcctgaagcccctacaaagtccagcagcgaagagacgagaccaggcagcaccttggagaaacaagagtccctgatcctgatcctccagaacatgggcacttgatggagctgaaactagtgacagcagtggatggaaacaggctgcgtctcaagggggttccataggaaaggtgccagccccagagagtaaacctgcggttgtttggagctagttgcaaagctttgctctccccttgaattaggcaatctaagcctctgcttaaaacctggaaatgtttaaaactccttccctggagatttgattcaataatgctggggtcacacccaagagtcttaatttttacaaagggaatttaattcgcctccgggcatagagctgtatgtccacaccctgtgctcagctgcgtggggacctccaaaaaggattgtctctagcctgccaccagcttaccccttgatagtattattcatgtctcattctccaatgaaaagcttttgaccttagggatggaggaatttaatataatctggaagagccagggactttgtattttagtttctttggctctaaataattcccgtaagtaagatatccaaatattacgttttcctgtggtttgccctttgtgttttaattcacaacatctctctgtagccctcgttgaatatctgggtgacaatacatttctcaacacttagaaataagtcctccacagccattacaactataaagtacagctgctaatagcatgcgatccaagtttcccaggctctcagaaaacatcaaagttttccattgccagaaactttgggtggaaagaaaagtgaaaaggagccttctgatccaacgtgtgagctgaggaatggtgagtgggttagatttatgaactgttagccgtcgtccttggatgcctggatggccaagagtgaggtcatcagaaagcaggtgcgcggctccctaacaggtgtttccaaagagccttttagccttttctgggctgctacctggagtcaaggggtgcagacatggggcacaggaattctcagcaatggtgctaaatcaacacaaatgttctcctaaaggaaattgctaagacttaaaatcgtggtcatgtgactggaaaagttatttcagaaaactgacatgaatttgagtgtgtgccaagtctgaagtctgagaatgttacaaaaattgggagagttcttcaaacaacaaagaacgcatttctaaaaatgtgtggctttgttgctcttgccttctcttgggttcaggtatgaatatgaaaagggatataaaagtccaaagtcatgggtgtcccacccaagaaaagggtacatgtggcccaatctgctgagcctgtctttgagtcatgcactgtctttctcccattcccagtctgtggggtttgagagagctgactctacacctgtgctccaagattggacgtacaacctgctccaactgcaatctgcaatcccctgagccttttgcagaattattggaaaagggctcctgagccacttggaaaggaaccttaaattagctgggcctatctttggtaccatggatagaaggccaccttgagggcaaagccaatacagagaacactagaagtgacagagagcagcagagtcttgaaagcactctttgaggccctggtgctggccatgcctaatgattcatctctgatttgattttcatgagattcctctcttggcataaggcaccatttcagaccagaagatccagacttcatcatttacccctcaaacaaaaaaatctgggatggagccttggttttttgactcctgtggcactcttggctaatcatttatagtttgaatgcatcaggtatcctcatttattaaaccagagggtagatcaaggtcaattctcagttcctcaattctgttatcttattatgaactccatgatcttataacctaacaccatctttaagttcatataaatataatttcttctctacacttaattgcctgatgatatggctcactttaaatgtgttcatttatcgaaggaataaaaaacttgaccttgtaagttttagcagcattactttttatttatgattaattctaattcctgttggctagtaggagaaaaaaacaaggatacttccaacgaaacccattactagaagcagctgtcttgtcaaagagcaagtagggtgtatctgaagatgtttgattggggtcccttttcctatacccacatttagagcctttttttcatccttagactcaaatcttagcctcatccttcacgtatctttgagccaagtgggacaaaaattctctgcagacacatacagtagtgccaggaagcttttctgcctgtctctcacccagcttctgtgttcagagcaaaaagatatcttttctgttcacagcttacaaagtattaatgtctacttgtttcttcacctgctgcctctaaccctagaatcctggaagtatatccttattggattagtggcagctaaatgtctcaaaacgaataaaattaccctagtaggaattgttcataggtaatttgtaaaatgaggatgccctgacatcttttcccttgtcattagacagctggagagacagaccctggctttcgttttgataacaaacaaagctccacgcaattcctctaaacaccctcacaggaggaactaaacaagcctatagaccagcaataaatgtggactcacgtcactgaataggccttttcccacgtataaatcagagataacgaaatttgccaggtttctgctttaagctccaaatgggggtagaattgtgggtcagggagtaaattgctgtatcaatgcaatacattgatttgtgagcatttcgcatttggtttgggaaagagaaaaagggggctaattcaatttgtactaagtgttttctttctcctttaagttgatcattggaaattctggcagttgctaggcaaaactttggtggttctgaaaaatctaccaggaagctaaggtaaggaattgctgagtcctgggggagacaagtttgacaactgaatgtgcaacaaacacttgaggtcagagcatttattccctgctgggccgtggtgtgcaatggctgtgtgcctctgcccatggccacgtatctgtgatgtgggtccttcccttttacagcagctctctcactttgcccctttgcacatagagctgttaatgacttcctgcctctggtcatccctggtgtacttctctcctctgttagttcactcttaaactctttctggatatttggaccaccacatagaaatggacacatattaatgacatagataaaaattgtgagccacaaaacccagatgtaagaagtcaaaagagctgtcattagtctgtccctcactatctaaattgtaaatggatcttttttcaccttctatgtctgtaatctacattatcaaagatagttttctcaattccatgtggtttcagccccaacacacctgtgaatacacatgcacacacccacacatttccaatttaaagctgtttgcaaacaccaggatgtttagtgacactgcccacctcctctacaccctgtaaccccaccaacgtcaaagaacaaacactctgtcgattactaatcttcccaaaccttaggtaatctaccaccctccaaaccccaggttgccccatgcttcatcctttacccaaaaagactgatcatcagttttatgtgtcaactccgccagatcacaggatgctgggatatctggctaaacattatttctgagtgtgtctgtgagggtgttttcctgagagattattagcatttgaatcagtagactgagtcaagcagtttgccctccctaatgtgggtggacattatagagcaaacggttggaggaagagaggattcaccctgtctccctgcctgactgaactggaatattgatcttcttctgcccttagctctcctggttctcaggtccttaaactcagactggaatctccaccatcagttctcaagccttccaactacactgctggccctgggactccaggtggcggagggcaggtagtgagaccacttagcctccataagcgcagaagccaatatcttataacgaatttatttatatgtattctattggttttggttctctggaggcctctgactggtacaaagaccaaatgtggatgtctcaggacccaaaggacctggagaagcagacacagtggactgtggcaccgtgctgtaatcactgccccagacagcatgaacagctcctgtcagggcacaggaaggtaagtgaggggggagaatagagataggataacatgagaccagtggcccaaagagcagcctccatcaaaattgcctctttgtacttggcacctaagagccaaaggtagtgtgaagatgatgtcttattataaaacccgatgtcggccgggcacgatggctcacacctgtaatcctagcactttgggaggccaagacgggcagattgcctgagctcaggagtttgagaccagcctgggcaacacggtgaaactctgtctctactaaatacaaaaaagttagccgggtatggtggtgtgcgcctgtagtcccagctacttgggaggctgaggcaggagaattgtttgaacctgggaagtggaggttgcagtgagctgaggttgcatcactccactccagcctgggcgacagagtgagactatggctccaaaaataataaataaataaattaattaattaattaaatatttaaaaaataaagtaaaatctgacgcctgcctagacttgctcttggaagccaggaaatcagatggctcgcaggagctgtggtctgcaaaagaatagaatgggaagaggtgaagaaaggtgcctgcagagatgcaccagaatcaggaaacaggatgtgggacttaggtaagccctaaaattttcaggcttgaaatccagtgcttagcaatcttgcctacgtacacgtcgtagtcttttgtttcccttagcctcaatgaccctttccttttagagccaactttgactacacattggaatcatcccagtggggaggcttaaaaacactgatacccaagtctcatccctcctcctctcagactttaacccatctgtgatgtggctttggatatttggatttttgtaagtttcttccgtgtgatcacaatatgcagccaaagttaagcatcactgtgttagaaatgtcagccagactcacctatactcaggaaagtacagaaagggcttcttagccatctttgtgtaggtaagaataggtactactggccccatgcagtggttcacgcctgtaatcccagcactttaggaggccaaggcaggtggatcatgaggtcaggagatcaagaacgtcctggctaacacagtgaaaccccatctctactaaaaatacaaaaagttagctgggtgtggcagcacatgcctgtagtgccagctactcgggaggctgaggcaggagaattgcttgaacccagaaggcgaaggttgcagtgagccaagatcgcgccactgcactccagcctgagcgacagagcaagactccgtttaaaaaaaaaaaaaaaaagtataggtactactataatccttaagctggacttaatggcaaagggatcaaaatgagactatactgcagaggaaataccacagtagtatctgaagaatgcccagtaatgctctttcccctctgagcagattattttcctttcagacagtggttctcgaatgttagcagcatccaaatcatccagagggctaggacttgtcaaaacacagactgctgggctccaccccaggagtttctgattccgagagttggaaggaaccctaggaattgcttttctgacaagttcccaggcgaagctgatggtgccgatgcagggccacactttgagaaccactgctctagagaaagttcctctccatccatgccttactctgccctattttatgtggttaagggagctcttcctttacagctccatgggagccttcccactctgtgaccacacagagggaaacatccatcatcctgggccagaaaaggcagcaaaattttatctattcccccagcaggtgtttgcaaacacagctgcccggggccatgcaaacactcactgggaactagggatttacatggctgtcattaaaaatcttggagcctacacagcaaagaacgcccatgtgtcagcaagaacatttcttcctatgatcacaaatggtttccattcctgaagaaaatccaggaaacgtgggaagaaaaattgccaagtcttagtccatcccaaaaatgaaacagaaagaaaaactctggaaatatattggctcttctctacccattcttgcactcctctttggaataaatagatttttcttgtatttctcattttcaatatttgcaaggaaacagtcccttgagaaataggtagagtatttggagaagattcacttttattaatacctgagtagcccattttttttcctttctcacaaacacaaacatcttatcattctcttttaattattggtgtttttttctttttatacatggaaacaaattttagagatagaaaataccagtggtgctaatttccctagcctctgtagaagaaaatgtagcagctgggacaagtgcatgaattctactgggctcttccacagtcacctctttacaaaggctcaacttagccaccctgaccccccagcccaggtgaaggtcactgtgatggttaatattgagtatcaacttgactggactgaaggatgcaaagtatgattcctgggtgtgtctgtgagggtgttgccaaaggagattaacatttgagccagtggactgggagagccagaaccaccctcagtctgggtgagcaccctctaatcagctgccagtgcagctagtataaagcaagcaggagaagatggaagaacagacttgctgagtctttcggcctccgtctttctcccgtgctggatgcttcctgcccttgaacatcaaactccaagttcttcagcttttggacttgtggacttacactagtgatttcccaggggctctcaggcctttggccacagactgaaggctgcactgtcagcttccctacttttgaggtttgggactcaaactggcttccttgtccctcagcttgcagacagcctatcataggacttcagcttgtgatcatgtgagtcaattctcctaataaactccccttcatatatacattcgtccaactacttctgtccctctagagaaccctaatacagccatgatctcatgtttctttgcatctcaaacacctgctgaagctttgagttcacaggggcctgaatctaaaagttgtgacttacaaatggcaggttgcatcactgggttcctgaaattgctatgcgtatgtgcctaggccgccgagaccagggataatggacactggaccagaacggacatggttctgcaggcatgatgaattaccccggggtagcctgaaatctactgcatgaaacactgatgccatgaatgtcagctgtcactggaaaaaaaaaagggtgccatggacacagaagtttgggaaatactcattgagttaaagaaagtgaatcatactggtttctttattttaggactcctcagaacttttaagatattaatgtgcacgatgaagtttcaagaggggatttatttgaacacaggaaatgtatgagatcagagagtggaaaagggggattctcttgggatatttctgaggactattttgggaaaaacaatatattagataacatctactttggggctggacacggtggctcatgcctataatcttagcactttgggaggctgaagcggatggatcacttgaggtcaggagttcaagaccagcctggccaacatggtgaaacccgtctctactaaaattcaaaaattagccaggcgtggtggcatgggcctgtaatcccagctactcgggaggctgaggcaggggaatcacttgagcctgggaggtggaggttgcagtgagccaagatcgcgccactgcactccagcctgggcgacagagtgagactacatctcagaaaaaaaaaaaaatctactttgatattttctcacataaattctgtgttccaagttctaagtttctatgatgtggaaataagtcttaatgaaccaacaaaacttaaaggtgaggtctgagccagccccaagtcatgtacttatgacctaagaagcaaaccatggtgaaactttctcagtgttccacctactccctttccatctccttgctgggctaagaaaaggattctggtaagaaaaaaaaaaatccaagagagaattttaaaacattaactttcaacttttataggcatattttaaactttttatttcactatcttacatataaaatatttgggtgagaatattcttgccaagagctctatgctgcctagagacctttacacaggccaatgcatcttggtggaaatcactttttcttaaagaaatatgtaaatgggtattcaaatgcaaagcccagaatcagagactgagctatctcttctatactaatttccctcgctgacctcttgtgctgtagtaatatatcatttagtttgacatctgatcaaatccattagtgtaaaatgtttttgctaattagttatattgttttctaacagtttaaatgctttaatgctccaaaattctattatatcatgctgtgttaattgtatcgtattaccataatgttaattatataattctatcattgaattctcataatattacacttataaactaagtattgtcaaagtattccccttttataggtaagaaaagaaagtcagaacaaagttaaataattatctcaggtcatacaattagtaatggctgaagccaggacttagatcaaaatccatctgaaaccaaagcctgtgttcttcaccatcaccttaagttgcctttcataattattggaataagactgagaaagaggaaaaatggaatctttaagataacttcttcaagtaaatatcaaaatgcctttaaacttaatcattaaaaattggaaatagattttagtaaataaatagtaacacacaaggacagattgaaaaaatacagtgttttatgatctgcaaattacatctcacttataataaattttataccaaataaacagctctatagataaaatcttatacaatggggctgtaactcctcaaagtgtacactgtttttttgttttgttttgtttttgtttttgtttgagacggagtcttgctctctcacccaggctggagtgcagtggcgcgatcacggctcactgcaagctccacttcccaggttcacaccattctcctccctcagcctcccgagtagctgggactacaggcgcccgccaccacgccctgctaattttttgcatttttagtagagacagggtttcaccgtgttaggcaggatggtttcaatctcctgacctcgtgaaccacctgcatcggcctcccaaagtgctgggattacaggcgtgagccaccgctctcagccccaaaatgtacacttttaaagatgcattccaaactcttagaatcaagggatttaaaaaaaaaaaacaacaacaaaaaaaaaaaaaaacctaccaccaaattggtgggaggagaaaagaactttacagtttacaaaatgcaattgatcttcaagtatggtaaaacacactcatttgtaccaattaacttcattattctatttggaagatttctctccctctctgtattctaaccttctttaaagtttttagtctgagcaatctttactaccttatttctagttaagattgcaataatttgtcattggtgtgcaggcactttcttaactattcctgtgttacaaataaaagagccagtattgctcgggagattatctcaagggccctgaaaagccaagcactataaaatcgttagacattgaagatgcgaagaaaacccataaaacaacgcataaaaatgtgtcttcccatgccatttatacggaaagatggtgcagttcaatccctcaagccaaagactattttagaattcaagtttcaatcagaactttcagaaaggaagaggtttcactctctttgaccctcttcctttggttgtaaaacagccaaagttaaaatcatgtgctttcttggcctttccattggccatttttgttttttgtttttgttttttttgagacagagtcttgctctgtctcccagtctggagtgcagtggcgcgatctcggctcactgcaagcttcgcctcccgggtttgtgccattctcctgcctcagcctcccaagtagctgggactgcaggcgcccaccaccacgcccggctaattttttgtatttttagtagagacggggtttcattgtgttagccaggatggtctcgatctcctgacttcgtgatccgcctgcctcagcctcccaaagtgctgggattacagacgtgaaccaccgcgcccggcctccaatggccttttgatctctctctctttctttctctctttctctttctttccccctctctctctgtctcatgaaatctgcttcttctagcgaatattatttctggaaaatacctgctcaatcagacctccaactcctggagaaaaaaaatacatatttatttaggcagatttataattagaaaaaaatctgataaatgtagaggttcatactcacttgaagagccgttgaattaaccattcaagggagttgttttttctttaaaagactaattctctgggtgcataatagatagttatcattctagccaacagtattaatttagctctgccaggcagcaatcagtgtgaacaccagaagaaaagttaaggatggcatcaccaggtagggaggaaatcaaatcccaggtatcatagttttaatctcacgatgtccaaagactaatgtgtcagagggaatcagagacagcatccagagggagcaaaggacatcaaaggtgagtgaactctggtcctagagcagagaaggtctgttttctgtcatttttttacactgcattccttgttagttttgaacatagatcatgatggccaggaagatggcaatgatttcctggtacgctgtagtagttgctgttaacgctgttggtactcttcccccttgtatcatcttagctgtcaccatttctgcacacatcaatctgacagcttccaaccatgaacacctatgtctctttgagcgctttctctagttatctgaacctgcccagaaagctggaagtgccaaggagttagcagctccccaccgccctcaagcaataactgaccagagttgaaacctcggaggaatcttccacactgccactgagagttccccagcaggaaggcctcagttgtgtgtggtgtgtatctgcttcatttccttccctgccttatatccccactctttactgatgtttcttggaatcacctcccagataaacttcttgcactggaatccttgtgcctccagaaatgcagctgaaaacataggcccacgctgatagagaaaggaagggaaatcagaaattctaaagttatcacaagatcctaaaagtgccccaatgtcaatgatcctatttttgtgtctcagacatgttactacagataccataaaacatatgtaattctacaggagctaggtctagtctgtggattaccaagaccaattttctgagccatgccccatccaggcaatcagatgaaaagagtgtctttctgtcatttagggaaaaccatgattcatggagaccagcgaggtctttgcatgtgatcaggatggctggtcaggatgcctatcatgcatgccacgtaaatgtttcaattgtggggctctgcaaagggttttacgtgagtaagtgtggaatgcattcaagaatgaaaattatcaagtattcagaaggagatggactctggggctctgagaaatgttctttgtgagccctttgagagttaggagccagagttttgaatcccacacgtggctcagttttcagtctgagtaaaaacatccgtggggtgctagacaagatcagtgcctgggagactcgggagactcaaaaccgggacatgaacaaggtactttgtttataaggaaattatacgggaacctttagaaagaaaaatgtggtctaacagtaattgcatagttggtgctggagtagagcaccagcaagcagcaaacccataggaatggggttcattaaaccttctgcaaatggcaggtgatggaggaaggtagaggataacaccctgtggggaaatcttgggacattttcatggctgcagaaactgctgggacatttgaggaatataaaggaagtcaatgtggtcagaaaaataaacacaaggaaactgacaaaaaattagattgcaaactaacataagaaccagacatataaagacttgtaaaccatgataaggactttgggtcacattccaattgcaatgggagaccataggggcagttttgagtagaagaatgatatgctcacatttaaattttgagatcactttggctacagaagaagattggcctgacatttaccaaatatactagaaaatgtgcttatgatatactagatattgtgctatacctctcagtgcatgtaatccttactacatcttgacaaaacaggtcatttttattatctccatggctcagaaaagatgtgtctaaccctgagtcacccactggtaagtgatggagttaggaactgaatccagacagagctaattgcaaagactgaactcaaaatatacctcagagtactctcgaaagaccatatgcaaattccctctctccaacccatcacctaatgcttgttgatgttctcatgggttcagtaagttatatcacagaatccactgtctattcaatggctgcccaatatgaacgtggagttttaatggaacaggtttttgtttgggggccccacttctctagcgttacaggtgtgccttcttctacacataaatctactgatactattactgagctgaatttaggtctgcctgctcagtgcagaaaagccaaacactgacattgagatctgcagcgagagaaagtgaggcgtttactgcagggaatcaaccaaggagaaaccggcagctcattcttgagaaaagaattccccagtggcttaaatgtaagggtgttttttgagacacagtctctctctgtcacccaggctggagtgcagtggcgggatctaggctcactgcaacctccgcctcccgggttcaagcggttctcctgcctcagcctcccaagtagctgggactacaggcacccgccaccatacccagctgattttttttgtatttttagtagagacggggtttcgccatgttagccaggatggtctcgatctcctgacctcatgatctgtccgcttcagcctcccaaaatgctgggattacaggggtgagacactgcgcccggccacatgtaagggtttttaaggtggggaagcagaggttacaggcagagtcataagccaatacatggaggcgatccattaatttgacctaaaaattcaagacatcttcaatcaggggcttataggtcacaggtagattcaaagattttctgatttgtaattgattaaggaagtgaaactttgtctgaagacttgaggtcagcagaaaagatgttaggtctgaacctgtaagcatgacctcctccaggcctctcgggaaaaaatttagaacaaagaatggcagtccggagttcagtcctcagttccttcttacctggggtgtatgcaccaggggatccatttggagggggtctaggtttctagaaaacaactcagggacatatgttaagatgtaatcttggtcgggcactgtggctcacacctgtaatcccagtactttgggaggccaatgtgggcagttcatttgaggctgaggagttcgagaccaacctgatcaacatggtgaaaccctgtctctactaaaaatacaaaaaaaaaaaaatagccagatgtggtggcgtacacctgtaatcctagctactcagaaggctgaggcaggaaaataacttgaacctgggtggctgaggttgcagtgacctgagatctcaccactccactccagcctgggtgacatagtgagactccatctcaaaaaataataataataataaataaataaataaataaaagaagagatgttatctttatgtccatcagtgatggactggatagagaaaatatggtacatacacaccatggaatactacacagtcataaatcatgtccttactgcagccacatagatggagctggaggccattatcctaagtggattaacataggaacagaaaaccaaatagagcattttctcacttttaagtgggagctacaaactgagtacacgtggacacaaagaagggaacagtagaccctggggcctattgagggtggaggatggtgaggaatgaaaaactacctcctgggtgctatgctgattatctgggtgacaaaattatctgtacaccaaacccgtgcagcacacaattcacccatgtaacaaacctgcacgtgtacctcttgaacctaaaataaaagaaaaaaagtgttatctttagtttctgtagggaaccaaacatctcctgactctaacttccttggctgttgttttaaagccactgttaccttcttgcttaatcgagttgctcatttgcttctcagggctggctaggtgtctagaatttcccttggaggaactcaagattttcccttatttccacggttgggggttccacaggcccaagtgggagtccgtactccatctcattacctgtttatagatgctacattctcactgagttttgagggcgggctggagggacagcaggacatagcctggggccattgtcacttggggcccttgagtctcgggatctctttcagtaggctcaggctggtgctaggcttttcactgggaccttagcagtgtccttgtaaaaccctacaagagtcgtaaatggttcttaaggagacatttgcccagaccacttttttatttctgtaaatgtgaaagattaaagtgcactttggggcatctgtccctgcttcctgcagacttgcattttttttcatctattcctgacaagcatgtatcaaccctgtcctaaaatctttacagaaagtgatcccacaagttctgcattacaggaaagtatttccatttggtacttacagaaacattcctgttacccagtgccacttaggaataagcaaacccagatccacgctgcagtttctacagatccttgcatgtctcccaccacatcctaggtgccctcatttactgtcttgtttatttcatcatctcaaattcttcacaagtttgattgtctgtaataacgaacacaaattgagactgcctcctggctcacaatgattctctcagtggtgatcattcttccaccatagcctcccttcttataagatgtcctggccgggggcagtggctgacgcctgtaatcccagcactttgggaggctgagacgggcagatcgtgaggtcaggagttcgagaccatcctggctaacagtgaaaccccatctctactaaaagtacaaaaaattagctgggcgtggtggcgggcgcctgtagtcccagctactccggaggctgaggcaggagaatggcctgaatccaggaggcggagcttgcagtgagccaagattgcgccactgcactccagcctgggtgacagagcaagactctgtctcaaaaaaaaaaaaaaaaaaaaaggtgttctgatccctggccacaagcggtaaacaaatgacccaatcagagttattcacactgcctcaccaccatcccctgccatggctcaagggatgaatgtgtgatttaagcctggccaatcagcgcactttctaggaagtttttttctagttaaattggaagaggtatctgggtgcagtggcatgtgcctgcagttccagctactctggaggctgaagtgggaagattcctggagcctaggagtttcaggccagcctgggcaatatagtaagacccatctctaaaaaaaaatgagagaagccttttcccttctccagacatggagatgttgccatgctggaggccatattgtcaaccatgcagttgtgttgcactgtgacgaggtagccacaggaacagggaagcagagaagggaaaccagcagtttcctgatggtgtgtaactccctcgttacagaggttactactcctcctctgggtttgttcatgtggaaccactaaatttctcttccttctttaaattgatttgaattctgacaagatccaacttttcattggatagcaaagaaataaattgaagagaaaggggaaagaagcagctctataggaaggggcaccctgatggtggaaacgatggttgataatcccacaccgagagagagaactggagaagcaaggagcaggcagagcatgcacttccacagtgcagtgcgggatgtttataactctgaccctgaatctgtgccaaaagttcaatagactctgtgtaagtgagggataaaataatagatattttagagatattttaatccaaatggtgaattctttttagagctcaggtgtttgaaggactggatttggttagtaagatctacatgctgaattccagataaataaagcactttaaaaaggatttttaccatatcaaattcataatttttcccaacactctacaattattttctcttacagactctattttctattccaaatgcaaacacttgtataaacatggatttcctttcatttcttttccattttctttttcttgctgtttgattcattcccctttccatcatttgggcctgttggtctgcaacttgctctaccttcagcactggccatatcccagtcctcagaattgaggtgtttttgttgttgtttttgttttttgttttttgttttataaattctttttttttactttgtttatttttttatttttattttttattatactttaggttttagggtaccaaaggtgcattcgttcaaaatgcagggcctctaccttctggtagtttatctcctgtgctagccctacggccctacggtcacgaccccagcttgcagcccaggaagtggtaaggcagatccatgagttaacagactctcctgagtcatggttctaaccagtactcatcttcctaggagagaggctctgctcagctcctgcccatcccccaaagatgtacctttggtaaattccacttcagcagctgaactcctgtgccaactctatagctctccaattattgccttccccttttgggtgcccctgcatatccagcaggagagcctcaaagcggggcttagcccacaaaagttcttggtttgggccaggaaagaattcaaaggtaagccagtggtagggtggaagaaaacagctttattgaagaggcggtgttacagctccagcagtgatacagctctgtgactgctcctgcagagcaggactactccataaggtaatgtgctgggaggagcagctcagggcggttcccagtcatatttatacccacttttaattacatgtacatccgattaaggggtggttatgcaaaagaatgattgccgtggaaaggggcggtaactccaggtgttgccatggcagtggtaaactgatgtagcacattggtgggcatgtcttatgtaaagctgcttccactccatttctgtcttagctagtcctcaatttggtccggtgtctgagtcccacctcgagtccagtcccaccccctacctcaccacctcctgccaaatcacctgggtacaaccggtttgagtccagttattcctgtcatctcccactaggtcatacggacccctgcttactcactcggagtgtctttctcctgttacccgctactctccaccctctgctaactcccattagggcccatctgggcctatcatgcagctgctgctgcaggtaacatttctctgactccaagtttttctaactgtgtgcatttctaccatcccaccgacccccaaatagccatgtcccacaggtatttctaatcgagaatccagctttttgtctccattggtgttgaatattatatctgctccttttattagtatagtttcctaagtatatgatttccataccttctggcatgtgaatctccaagatttttttttctaattcttctaagctttatattgaattttaccaatgacttgtaatttttttttttttttttttttttttgacggagtcttgctctgtcgcccaggctggagtgcagtggcatgatcttggctcactgcaagctccacctctcaggttcacgccattacgccattctcccacctcagcctcgcgggtagctgggattacaggcacatgccaccatgcccgactaattttgtttttgtatttttagtagagacagggtttcaccctgttagccaggatagtctcgatctcctgacctcgtgatccgcccgcctcggcctcccaaagtgctgggattacaggcatgagccaactcacccagccatgacttgtaatttgtattgtattatatctatgccgccacccctttaagatatctgccattccacttctatcgtatatttgtgtttttgtgtaatatttgcatatgactttcttctttttcccttttcaatgttcttactttttcaacattctgccattcttgccaaattatgcatcttgtaattctatttcttttgcaaagagggactcctaccgttcagtgttttatcttaggtaaataaaatttaaattttttgagaatttaataattaactgagaacctgtccttttcttgctacttagttaaaccataatttaatcaattgaaaataattgtacatttattatttatagcttgctcttactgttgttttccagtggtagggatgtgaactgtctttgggctacattattcttattatttcgtaaaatattaaaaatagtcttcatcaatgagaccacttaactgacattcagaaagcagcagaattgtttgacccaacttgtctgatattttcaaaatctttcacgtaataattcatcctcctcttattttaatttttcaattattttcccatacctataataattaatatctatccatatatccgatactgctgggtcctgagtttccttcctgttccagccattggaccctgcgtgtgatccctctttgctttgagtcacccgctctcagcttcactgctcagtgcagcagaggctcctatgagcagtccctgggggggcctcacctaactttccaataacagtctcgcccggagcacacagtgcaatttattttcctttctagatacgtttttgtattgtgtgaatacagaagaaaaaaatggtttttcttaagggaaacagaaaaaaatgaaaactgaacagtaatagaaaaatggtcaaagaacatgcagaggtaattgacaaaagaaattcccatggacaataaacatatgaaaaatgttcaacatcagataaaaaatgaaaattaaaatcatgagatgcccctttcatctaacagattggcaagattaaatacattctcagtgtcagaatttagaaaacttcctaaaacattgcatttgagttgccggaaaagaagatgaattgcaacactctaaaagctagctcagcaaaatatatcaaatgccttaggttacaagtaacatttatgcatacatttctagaaatttaacttcttggttaaaaggaataaagagtaacagtaaacttttatccatatgcataattataacaacgttatttagaatagtataaaaagggaaacaacctaaatgtccatcaactgaggattgtctgtatcagttttattctgtccatgatggaacatatgaggccattagaagtcacacagtataagaatatgaagaaaaattttactgtatgttgctaagagaataaatcaagtgcgaaaataatatggatggcttaaatcaaattattataaattatttttgagagttgtctagatgcataggacaaaataccaaaagatgacaaaatgaaaagttattggaggctatttctgggggttccaacatggagactttttctctcttgtgcttttctatgttctccaaattgtttatgattttaaaaaacttaactttttaaaaagagtcaacctttggaaacactgaaagtgtcctataattcaatgtcagcacctatctgtttcctgtttcctctaattcatcttatttcccctaaacagtaatgctatggggcggggtggcgggtggggataagccatctactactttttttcctcgttgttttgttgttaatactccttcagtattgctctttgttcactgaaatatgaaacagtggctgaaatagatccagcatcttgccagttactagaaccaagaatgagagcaaacaatcacatggtgtttcctgagttccgggaactgttctaataatgcacgtgtgtgtgtgtgcacgcgtgtgtgtgtgtatttaaattctcacacaacagctccatgagatagatcttaatatcatgccccttttatgaatgaagaaactgagaagccaagtgacctacccaaagtcacacagcaagtgcgtgtccaagcctggattcaagcacagtcagtggccccagaagctgtgcccatcatcaccatgagatgccacttctacaaggatgcaagatgcacacagtatggctcttgtgttttccattctttgccattgcgctatttcaaccgaggtctgggttaagtaagaatttttgggctgactttgatccttaactgccatttataatattacttctatagaaagaaatcactacccattctaagcaactgaccttcaaatgaaatttctgaaaagtctatttataagttggggtctgcctgtttatctcccaaggagattaatgccaagggaaagacatgtgtttccatccaaaagaaatgtctggaaattatttggcctttggatcacctcaggccatccatctttagccaggagtttactctgaagactcttcatcaagtgcttaaaccatgaataaagactcttcggaatgctaacatcaagtcacagacatggttttggaagccctagaattttcaaatgggcacacacatacttctgggaaaagagtccttcttggccacttggcactcttgaagagaaggcagaaaagcatgaaagccgagcatttcctgatcctttcagaagtagatgaatgttcaatgaagataaaatattctagaagagagaaaaggctgaagggcaggagagatttaagctggcataattttcattgttcctaaatatattctaatatatgcttggatttgcctgccagaagtagaccacataatcaacaggttgcaaaaaattgcttactgagctatttcaatccaatttctaatagcaatagacagaatacaattttgctccatttccctttccaaaaggtaaagctgtcagagaagtttacgtaaaagcaatacagcaatatcatactgtatccttagaaaaatgcatatttgtacacattttctccttcatcagcaagagaaaattgggagactcagaggtaacaggagaaatctccctagctgagaattaaatcaggaaaactaaagatacagtttaaaagctttttatacaaaaccatctcatttggaaaaccaaaacaagcaaccattcccaaattgcaaggacatgaaccatgttgtcacaaactggaaattgtacaagattaggaaataacaaaatctaatctcatggaaaaagaaatcatagtcatctgaagttccacaaagaatgctgtccagctttattactctaaggaaaaattctgagtagaaagtagtgacattttctggtcatggcgataaagctcctttacatgtggtatacattcagtgagtgtttgaaaacagatcctattataggcacatacttttgatacatgtgtttaacactgatttagtttttacacatagcagacttgtattacatctggttctcaaagttgagagattcataaataatctgcatattgcgttgttggttccttttgctctgtttgatgaaaagaaagcgtgtttttacaaggagaaaaagactttttaatcattcatcagctctgttaataagcactctaaatcctagaatgtgggcttagatttcctgaagactttaatggcataatattttacaattattcttcactaaggtgtcattttattgtattgacattttttttttgtttccatgtttacgtccaaagatactgataacagactagaactatagaactgcactttccaaggtaatagcccctggacacagatggctattaagccccagaaatgtggctggtctgaattcaaatacactaggagaataaaatacacactagatttgaagacttagtacaaaaaaagaagaatgcaaatcatcaacatcataatttttatatcattgacatgttgaaatgatactcttttggatatacagtaacatagaaaatatatttttaaaattcatgttatccattctctattctcggtcctgtcccctgccccagcaggctgacctctgaggactgagtcccccaggcttccttgatggcaggttcctggttgagttcagccaatgggtggccctggcagaagatctgagtgtgagaaaaaggagcaggcaaggcaagcctttactcttctcccctccctaccttaggtccatgtttcttagagaagctgggcgtcacggtgacaacagctctaacttggtggctcctgctccgggactccaccttccctgggctctgaaaacacagtgtcctgcttcatcacttagggaagtaacacttcccactgttactattctctgggtgccttgtcacccttggttggtttccttagccctgccactctttagttcatccctgtattaaaacctattaatgcattaggcttttatgcattaataggtgcatttgaagcacctggggtgaattctgccccctgctgggaccctgcctgatacacaagcccattcttttctcctatataacagtagaaaaagccaagatccaagacccacgaacaagatatcttagattatgttaaaatgagtttaatgcattgaaatcagcatatgtactctttcttagtgatccaggagctccttggtgacacaataaagccaatatgatttaaaccctgcccacagtggccaagccaccctctcacttcaagaatgtgagcaaatgaggaaagtccacagaaaacaaaactgtgcagctgaaatagtgcccacagagctacaaacacagtgtttgagagtttagaagaagaaatgtatggatgtggtctgcatttcccactcagtcctgcaatcatttttctagtgaacagcaggaaatgtgaacattggctagagcataaaatctgggtatcacgcaaggtgttgcagatctgtagtcctggctactcaggaggctgaggggagaggacaccctgagtccaggaatgcaaggttgcagtgagcagtgattgcaccaccgcactccagcctaggtgacagagtgagacttcgtttctaaaaacaaaacaaaatactggctaaggcagtagcaggtggtcataataataagtgtagctaatgactatctagtatctcctatttgcctaacattctgctaaatacacaactattgctgtcacttctgaacagtacttgtcattttccaggtactttttgtaataaccactttacctctataagttataataaccactttatatatatatataaccactttaactctataagttataagtaaattatataatagatatataaccactttaactctataagttataagtaaattatgtaatatatatataaaaccactttaactctgtaagttataagtaaattatatatatatatatataatcactttaactctataagctataagtaactcatatgattctcataacaaccttagagaaaaatactatggtagtctccattttacagatgcaaaacctggggtgcagattttaatcaacttgcccaaggtcccatagacaataactgctggaactggagtttgagtgaggcagcccagccccagagacttcattcatggccattatgccctacaccttctcgtaggctgagttaatcttcacaacacccccatgaagctctgaggagagcagaggttcagaattgcttcccaaactcagccaagatcatgagactagtccccatgacactatacggcctcccaaatagacgtggaaaatgaactggggccaaactgtagagagcttggatgaatagtttagtgcaaagatgaatactgtagtcaatctctccttactccttaacttcgctcctcttcattgtcccccatgcttcgtgctctgggtaagccacccaatcattatctttgactccttttccacatctcactccattatctgccttcctctctctaatagtttacctttcttcctcatcttcctgcattcacttcaacagtaccagacatttcacaattggccaactgttatccactttctccatccctaccttacatgtggaagaatggaactaaccccaacaagcttcatcagccacctttgattttcctaagccaatcagcagggcttatctacctattcacaggaattggttcagggacagacctagccgactgctggagccagctcccaggggcttcagagagtccactgcaggcccctctaccgcacgctgggtccagggacatcgcattggtagtttgaaatcagccatggtgagagagtttatgccataaaaatcaaacgctgcatgtcagggtttttttttttttttttttttttcatttttacctctttttcttttttgagagagacagacagggagagagcattgctagacattcatctgtacactacctggatgaacaagacctaatttaggtccatgagacgtgaggagatatttaatcagggtttggagaaaccatggaagaagagtctattcttttgtgtagggagagttataaagaaattggatgtgagactactaaagccattttggccatcaaaggacctaaccagaggacagagttgacacacagagaagagatgctctgaaaggatcaaagaggtctggagtcagagcgctgagggtgtggacttctgaatccacccccaaagcccgtatgcctcttcactcttcagttaaatgagccaataaagtccctgttttaaaaccagtttgaattgggatttttatggccatcaattgaaagatgttgtggggatacacagagttatgacttaggagcaaggccacccctattgcagaagcccaggggcacgattcactttgaagtctttgtaagggggagtccttccttggagccggcagggcccagcctgtgcagccacatgtggcaaatgtaatgttatgcctaagaaacagcctattcccctctatcactcagcaggaagcccaaattccctgctagtaccccactgattccttttatttcactgccgattttcattcatctcttattaccctgctgcatgtaagacaccattgccctatttttattttttcacttcttccaacagccaacttttactgttttttacccttattctctgtcttctatagcctttgggaattcctaaaaagaataaacagatttttaaaatccaggccagctccatcgattaatcaaagttttcccgtcagtcttacaagcatttatcctgttattttgctttctgttcaacccatgttgaccaagctggctcattcatcatccgccaaatatgtccaacaagtatgtgtttcagcacctttgtgtgtgatgttctccttgccttgaattccaagatcctttcatcttcccatattgaaatctcgtttccagcaattcccaattcaaatccctcccccttatgattgtcttactccaatattatcacaagaaacagacttttttcgccaaaaaaagctaaatgtatttaataaaaaaaatacagggctaactcacagaacctaaggcataaaatgcagccaggtctcatatgaaattggagtaagagaaaccagaaaatcaggaatggaagttactctgtccatctctgaagcaccccgttctcacttgtctgcttctctattcatatatgtttcattgttgttgctctcttctcatccgctctctggattttgcatatatctggtggtttatttgtttcatcgattccagagtccagtggaaacagagtaggttctcactatgtctcaatttcaaatgtcttggaggaaaagctaatagccaaaccaagccaatgggttgttttcccctgggggtgatgtccactccgtgacaagtcaactgtgaaagaaggtacatgactacatggcacctttgactgttccttccagggacgtggaaagatcagactctctaaagaggaggtgtaagggcatggaagaagggattggcatccctaatatggtaatcgtgccttacagagtgattccacatcccctacttcttactacacttatctaatactgttgtaacttagattcatgccctactttccccactaaggtactaggaacagaaactagtctatctgcatcttatgtaaggatcactattgtagttggattttccagaaagcagactccgagatataggttagcatgcagaatatttattaaagaacatctttggtatcaagttctgtagaaggaaggggaaaaaagcaggaatggtcagaaggaaactgtgagcaaattcatgacaatgaagtccaaatccaaatgacagcctcagcctaccctatggggagctccggagcaaacttagcattgtcctagtaaggctgagatcaccaggcctgcatcctgcatctaccagtcactgggtgtgaactctaccagggatggggtcatgtatttgggtgaggggtccttctgcagctgaggcaatctggaagggctaacagctggatgctgggtgctgacaacaagctcagcagctgcagcaataggtattttaatgaaagggggtctggatggcacaccacaatgatcacaaagatgactgcagccaccattgtgccttacacaatgcatgtgcttacacaactgttagctacttcaaagcagcggtggggggggggagaataagaataattgttaaatgaaagagtagaattgattttttaaaaaatcccaagatttgaggctagcaatgtatacaaattccacatctgcctcctactttgactttaaacaagttaccgagcttctctgtaacttcccttcactcccctgagatgatagcaaatatgctccatgcatgtctgtccctaatatttgtgtgacccagagaaagaatacaaatgaggttcccaccccacgtttgtgtgtagcttctcaacccacatgcccaagtcctgttcacgctctttccccagcacgcctcttaatagcagctccttggatcactctgccaaacagacctggaaaagaggccctcgcagtctttggaaatggggttgaggccatttgcttagggaacctaataccccagtgtctgaagtggagtctagaaagagcagcacagctctgagtgcgactcccctgggccccaatttcttcacttcacaaggagaagactgggatgctgaagttaaaataggtcccccaggccaggcgcggtggctcacgcctgtaatcccagcattttgggaggccgaggtaggcaaatcacctgaggtccagagttcgagaccagcctggccaacatggtgaaacctcgtctctgttaaaagtacaaaaattagccgggcgcctgtagtcccagctactcaggaggctgaggcaggagaatggagtgaaccagagaggcggagcctgcagtgagccgagatcgcaccactgcactccagcctgggcgacaaagcgagactgtgactcaaaaaacaaaaacaaaacaaaaaaaggttctttcctctctttcttgtcctcaagagtatgcattaggttgggcacagtggctcactcctgtaatcccagcactttgggaggccaacatggctggatcacgaggtcaggagttcaagaccagcctgacaaacatggcgaaatcccgtctctactacaaatacaaaaattagccgggcgtggtggcgagtacctgtaatcccagctactcaagaggctgaggcagaattgcttgaacttggaggcgaggcggaggttgcagtgggggtatatcgcgacattgcactccagccctgggcgacagagtaagactatgtctcaaaaaaaaaaaaaaagagagagatagaatattcatttacctctgtttctatgactttttctgtaagtatagttatcctggttgatgtttactgattttttgagtctgtaaatttatgtcttttaaccaatttgggaaattatcaaccattagtttttgttttatgtttttgtttttttttttttttttgagacggagtctcactctgtcgcccagtggagtgcagtggcgcagcctcggctcactgcaacctccgcctcccggcttcacgccattctcccgccttagcctcccgagtagctgggactacaagcacccaccacaacgcctggctaatttttttgtatttttagtagagatggggtttcaccgtgttagccaggatggtctcgatctcctgacctcgtgatccgcctgcttcggcctcccaaagcgccaggattacaggcgtgagccaccgcgcctggcctagttttttaaatattttttttctgccccattatctccctcttctcttcttccgggattccagtcacgtgtaggttaaaccttatgatattgtctgtgggtcactgagccaccatttttattttttaatctttttctccttttatttttcagactggaatttctattaatgtatctttacagtcactgacgctctcctcattcacttacattaagtccatccagtgatttttttttttaatttcaggtattgtatttctggttctagaatttaacttgtggtttttattaatagtttctatttgtctgctgagatttcctttctgtttattgattatttgtatgtcagcattgagcatagttataactgctttaaaatcctcttctgagaatcccaccttctgagttctcttaaggttgggctcattgctgtgttttctcttaagaatcgattaaattttcttgtttctttatgtattgagtaatttgtaattatatcctggatgttgtgaattttatgttgtggtgactctggagtgttatattattccaaagtatgtaaattgtccatttcaacaggcaatatacttggttgctcaagttgcaaattatgtctcttgggtagcatctcaaatctcagttcagttctttaatacttaagccgcattgagtcagtcatacatatctagttgagggggttagccggagatatgggcagagtttatgtgtgaaatttggacgacttctctctggctctctcttttcttgaattccatgtgccacccctcgtcctttctagtggcagtagttgtcacaaattctgttctctgatttttgaggccagagagactgggttttctcttggaatttagtcaatctgcatgacactgatctagcctactcacaagctagaagccttggaaactcaccgggtgccatttccttcctccaagtgccaactccccttccgaatcagctattttggcagttacttcagtgaaccgctttctgtaatttttctaaaagctatagtgaagatgttcaggaggatcagtccagtgggaatttaccgagccatgccagaaatggcgccatcttctacagctacattaacaagaaaagaagactcgcctcatttccttttccctagtctttctttctccgtttttttttctcttggagttgtatctccctccctatggaagtctgcagcctttttcggtgaatccttccccattttcaacaagagtagctgttgaactcaggtatatatacttcctgatattagatcccccaaggcacacgatcctggttggccactgctctttttgtctctttttacctggctaggtgataagatttttatctcctctacttccttctctatatatgcctccccgagctgttacacaaacttctgtgatctctgaaccttctcaccaaagtggttagtgcaccagtttttgtttcctaacactaatgagaaaaaagtttttctagataagtacacgtggggtagacatagggtatattcttttctgaatttgtgtttccaccagtaatctaagaatagcgttgaggttatgacttctatttcatttcaaatactcaagaggagtttatgaagctccttcctttctaggtcatccatgacgacccagtacatttattctgcaggaattcacatctacagaaggctggcagtcatcttccatctgtaagttttagaaaagaaaacaattctttttttcttagtctcaatgcctataaaatgattcttcgttagttatcacatttggctgccacttcttactcagggactccgagctgcttcactggggaaaaagaaactactctgtatattcgaatagtaggaattcaatcaagggatttgtcatagaggtagtggaagacctgagatacaactgcaggaagccactacaatctctgtctggagggacaaagaaggtggtattactaaagctcaggtcctgcagaaactggaacaaagctggagcgtgaaggaaaacacagacacactgcctgtggagctgcaaagatggaaaaagactctggtttctacctgcttgccaccctccaatctctcttcaacatctgtcattaaatatagctgcaatacagagcagagcaagggaagtgtcaaaaaaatgatttgaaagcaaatatgaagataaatgaccagcataagaagtatagcaaatgtcgtaggaaatttgaatttacttaagctgaaagatcttaacatgaatctaaagtcaaactgtaggccagacgtggtgacttatacccatactcccagcactctaagagtccaaggcagtaagatcacatgaggccaggagtttaagaccagcctgggcaacatagcaagaccttatctttaaagataaaaaaaaaaaacaaataaaaataaataaaatcaaactgtagtgtctttagttggggtggttatggagggacaatctacggctaattttggactgttttagtctctccttgctcctaacagaaaaccaggatgtggttcctccagcattctcttggttgagataatcacttccatactttttcaaaaacctctcaagtcatcttcacctacaggtgctatgaaagaagagccctccctttctctcttgctcagacacccagaaaactgagctgtaggatgtttgcattccccctactctggctcagaatgattgcatttggttcagtcacagaatcagaattccggtttctaggcattgaaagcacaggaggagtgcacatcccatttctgcatgtctgtccttccctgtggcccccgtgtaaatctgtagacttacaaatccttagggctggcagggagttgaggtcctgctggagtgatggaaagggttggactgcaccccattcagtaaggatatttgggaacttgaagctcctttagacttctctctgaatcaggagatgtacttctactcagattaccctgcctgcctcagctgggggaacccaggaaaccactaatcccatcatacacagggttacttggtacacatgggctacaaggaaatacccagccaggatcttcttgcaaagaccaggcgatattcagaacaaggatttcagcattggcaaagggcagtctttagtgaaattgggaaaccctgatcttctgggaggacagagagtcacacctgggagtaccctgcaggcagtcgggcacacaacaccacacaggcagcctgagtctcctgtgtcccgtgtgcccctgccatgtgtgtcaaatggctgaacatttccgcctgtcccgcctcatgggattggaataggtttacaacagaagtgaatgtggaagcaatttgtgaattcaaaagaactgtatgaatgccagcactattagttcctcgtttactcttcattaaggagcatgagtcattattgagacatttctttttcagcaactctaagtcactggtgctctttttttgtgtgctcttatctcattggaaaataagaataagtccacttatttactggtgtgaacatactctccatgaacagtcccctaaatattttgaaaactgatgtcaagtcaacctttaaggacttctttattaacctttggaagactagcataatcttgtggtcattgtgccatttgatctgaaagaaggaagaaaagaaggaaggagagaaagagatggggggaagggagggaagaaaggaagacagggagggtggaaggaatagacggaggaaagaaggaaaacagaaaaaaatttcaatataccctttatatgttatctttgatttccaagttgataatgaaatagatttaaaatttggattctatctatagaaaaataggattcttccttcttcaaaaagctgtattgtccttctccacaaaataactgagatcaccttctgaggactgcattcttctggtgagctcaaggatagtaatagggtccctgccaggatagggctagtaccaggccctgtggatatgtgatgacatgagtcaatttgacttacacattcctgagtttgtcatctcagcagctcccagggaaagcacctggagttaaatttccatgaatccaccagaatagcagagatatcaggaagtaggctgactgctttgtcagcgcctatgtatgaagatggtatcccctctgttcccatatctaccctgccacaagtccacagacttctctaggcatcacaccccttcctgatatctcattatctgaggggtttagaccctacaatcaggctactagccatgaacccacttaacagagactaaactcatgtagtcaatagaaaaataaactaattaatgttattctatatttaacaatttagtttaaaattacaatgatttaattattagaacaaagaataaatcaaattttgatttgtaggtttagggaggtaaaatttccccttaaaaagctgaaaggtagcgtgccaagacttcctcacccaatgcttaacttttgcacatgatttttaaaagagttgctcattttttttttgcaaacatattcaagggcttcatcaatgttctcaatgacctgccttttcaaatggattcatatttaaatcattctcttatgaagtccttccatgatattatccttgcttgttttcatttcttcggttgttaactggtttaaatattttagatcctcacgtatcagtggctttgcttgattctgggagttctccattcacttgataaagtcctggatattttgcaaattttgcaactttgcttcaaaacacatttgtagtgtatatgactacattaaccatttcatgcatgtattaaccatgcaagaaatcaatatccaataagtagggcaacagatccattcctaaagttaaactgggaggggtgttgaaatagggactgatttcatgcatggttaatacattggtggatattcttgtaatacactttgtttccctatgcaccttcaacatgtaggaacttgaataagatagccacagacaatgagcacctttggacattagatgctgcctttatgtggataaagtggctgttgaaccgggacgcccattctagactagaaagggaatcttctagggttagttctctgcagctgccttatggtttgggctaggaggagatatggataggagctaaaagagaggagtttttaaaagcaaatgaagcaaaacgctttatcaggtaaagaaaaggcatccacatttcctacttgcaccacaagtagtactagtgagtcctacttgttaagataaacgatagccttgcttccagcagccagttgtcccttgtttctaatgaatgtgtcacacaaagaaaagacacgatcacagccaacacttgcttctgcaaactggcaatgtctgcagctaaattcgaatttaaaaaaaatattagaagagtattgagaaaagtaaagaaaaaagaaattgcatttagatttcaacctctcgccaagtccatacttccgtctgatgttgcaatgaattagctctctggggaatcccgggaaagcccaccgcctccaactgcagacacaaaggagaaggtagttgctgacttcaattcaaacaggaaagtcaacaattcctttttttttttttttttttgagatggggtcttgctctgtcgcccaggctggagtgcagtggtgtgatcttggctcactgcaagctccacctcctgggttcacgcaattctcccgcctcagcctcccgagtagctgggactacaggtgcccgccgccacacccggctaattttgtttttgcatttttagtagagatggggtttcaccgtgttagccaggatggtctcaatctcctgacctcgtgatccacccgtctcggtctcccaaagtgctgggattacaggcatgagccaccgcatccagcaacaattcatttttaagtgagcaaactaaaaagcaagtttacaggagacagggtgaacgcctctccttaccttacccctgcctaccatgccaacctatgacttgtcccagttgaatgaagtcattttccatttttgtgttaataagcaaagtctgggagcttccccatgcctggattgccatgccatgtgagtccactgcataagtgttggggtttgaattaaattcttggctcttccattactgcctgtttgatcttaggtaagctgccagcctctctgggcctcagtttgctcacgttgaaaatgcaaacactatcagtactttccttacagagtagttgtagggagcaaatgaactaatacacgcaaagtgtataacgctctttctggcacaaggcaagtgctcaatgagtgatagttactatgactagataatatgtggaaaaatacaatatggaatatataagatatgagagagttaaaaaaaaaaacactgagagcatatcatttgggacctcagttttcttaagtgtgaaataggggtgaaaatacctattccaaaggtgattttgatgttgaaatattaaatggggacagtctttcactaaatgcttcgaagttatggcccttatttttattgcattaactggctctggagcatacaattttgaacttggttgttttctctgctgtttcttcaccatccccagtcccaccggctagggagctggaattcctggtgttctcacaccactgtgtacagctgtgcagtgcacaacctccatggcagttctacatttcatctcaaacctggatctgggtcttattcagcccttctccctgctccatgtcctgtgccctcaggagagtaaccatgatcctccaggaacccctggaactccccagcacacggtgtgggctcctcacctatgggttccccaccttccacgcagggagctcagaaaagcctcagccctggactgtgggtgtgggagggggcaagctggggtccagggagctttggcccctgctgagtctgagtcattctccctttccctcaatgaaggaaatgtaaacatgtaagaaagaaaggaactcaacaccacccgtgctatttgtcaaaacggacaatgctactgtctatgcagtagaaggttattgaatcgggggtccaggaggcctgaatctttgctttggcttagcttgggccaacaccataacctggagaaggcacacagaagtacacctcgccttcctgtcctcatctgtgagattaacttacctctgcatcctgtggagtattagtgtgccagggtaccattcaggccttccacagagtgttactgtggtattccatggaaaagaatgttgtgagatgggagatgtaattattccacatcaaacagaataaaacatctttcttcacagacagatttttcagagggaggaaggtttatcattgcccaaacttactttgccacattaccctttaaatttttttaatggaacatctgttaacatcttgaagatgtccactgaggatagcttgggcaatgatgaattacacctctttatagtccctcttggtttaaaattacagtgtctcctcaatatcagagaaataacttcgaaaagaaaaactaaaatatgagttggcctgagtaatcattgtatcaataagagtaactggtgaaaccttcttctaacctgttgaattagcatgtgtttatcattcgttgggtcaaattaaccttttcatgtataattttgttaagatatagtaatttttacatttatacagcattttagacatgtaacatcattaaactgatgacaggcaaattagaagaaaatcagacaagacattaaatttgttaaataattaaagaagtaccctatggttatattttattcaaaagttaatttctgatttgttatattttttgaaggttctaagctagtgaaagagagtttgttacttgacagtagtgaattacaaataaaaaatttctagattacagatgaagactcaagccatgctagattactacaattctaagacaagctttagttaaaacagggttccatcatcatgaatacctacctggggccgggcgcagtggctcacgcctgtaatcccagaactttgggaggccgaggccggtggatcatgaggtcaggagatggagaccatcctggctaacgtggtgaaaccccatctctactaaatatacaaaaaattagccgggcttggtggcgggtgcctgtagtcccagctactccggaggctgaggcaggagaatgccgtgaacccgggaggcagagcttgcagtgagccgagatggtgccactgcactccagcctgggtgacagagccagactccgtctcaaaaaaaaaaaaaaaaaaaaaaagaatacctacccgggtcgggcgcaatggctcatgcctgtaatcccagcactttgggaggccgaggcaggcagatcacctgaggtcaggagttcgagaccagcctggccaacatagtgaaaccccgtctctactcaaaatacaaaaattagccatgtgtggtgctacgcgcctggtaatcccagctacttgggaggctgaagcaggagaatcgcttgaacttgggaggcagaggttgcagtgagccaagatcacgccactgcactccagcctggccaacagagtgagacctgtctcaaaagaaagaaagaaagaaaaaaaagaatacctacctaataaccctacacttggatgcagtaggacacttctaacaaagtatattcaaatttcaattccagttttcactcagtcaactcttcctgctcctctagcctctctcagggaatggtaggtacccagcgtcctgaggcccagacccagggaggagcccagactcttccccacctctccacacccaccaagaaaacacaaagcctggaaattctttttaccccctctccagtcaacccacctgtctccatcatcgctgctgttttccctgttccaggcaccataatctttaccctgaaatacagctacttcagtgatggctgcacctccagcatctaatccatttgccatactgcatctaatccatttgccatactgcagccaggaagatctttcctacgagatgatgcagtcatttaccttcctgtctaaaagcccttcgtggctccccgctgccctgaggatgaagtccaaactcctcagcataacataaaaggtcttttttgtctcctacttacaattgctggcttaaaaaacgaatgcatcggccaggcgtggtggctcatgcaacataatcccagcactttggcaggccgaggcaggaggattacatgaggtcaggagttcaagactggcttgaccagcatagtgaaaccccatctctactaaaaatacaaaattagccaggtgtggtggggggcacctgtaatcccagctactcgggaggctgagacaggagaatcgcttgaaaccaagaggcagaggttacagtgagctgagatcgcgcccttgcactccagcctgggcaacaagcacgaaactccgtctcaaaaaaaaaaaaaaaaaagaatgcattacacatacatatttattatatagtatattcattctacaaataaatatataatgtataggcacacacatttccacatacaattaagtacaaagaaaatattacagaccccaatgtataatgatttggatttcacaaacattaccattctgccatatttatttatataattttagatactgttttaaagaaatgaaatattatagatacagctaaacgttctacaccccagccacaaatcccaccttccaggccagacattgccagagggaatctacctttactcttttccatcagcaaagttaattaccccagcatcctttggtgaacagttcatcccttcctcacaaatctggagtgccttctctgtcctgtatcagctgtttctcaatgcttaattctataattctgttccattggtctctctctttcaagacaagcttttctttattattcttaaaagatgacttgcctatttttggctctttatttcagttagatgtttgttatttttaacagaacctggatactaatttaatggctttgcacgttatgggtatattcaggctttctcttattttcttgaggaaataactatagttatttttattcaaatatgttcatttgtctatgggttcatatttattaacaccatttacattgttttattaacctctgtaagtttttctagttgattcatttatgcttttatctttattattgctttttatttacttttagagagcttgtgcttttattgtttttccaacttctttttgttttttgtttatgaatactatttttattgatacataacagtcgtgcatattttaggggtacatatgatattttgatacatgtgtacaatgtttaatgatcaaatcaggtaattgagacatcaataacctcaaacatttatatttattgtttctttgtgttgcgaactttccaattctgctcttctagctattttgaaatatattattaagtattatctccctactgtaccatcaaatactagaacttattccttatatctaactgtattttagtatgcattaaccaacttcttttcatccccttcttagcctctattaatcactattgctttttcaacttcttgggacaaatgcttaattggttaatttttagtctttttttttttttttttttttttttgagatggagtcttgctctgtcgcccaggctggagtgcagtagcaccatcttggctcactgcaagccccgcctcctgggttcacgccattctcctgcctcagcctcccgagtagctgggactgcaggtgcccgccaccacgcccagctaattttttgtattttaagtagagatggggtttcactgtgttaaccaggatggtctcgatctcctgacctcgtgatccacctgcctcggcctcccaaagtgctgagattacaagcgtgagccactgcacctggcctgtttttcttaatataagcattgacagtatttagggtaataaatgtccctataaatatcagtttaactgtacaagttgtggtatgaactgtctgcaatttctattgttcttaatattttgtaactatcaatttgaattatttttaacccatcaattatttagaagtatttttaacttaatagtgaatagaatttcttaaaattatcttttagtcattaatttataatcttacttcatctttgttagaagacatagtttgggttatattgttttcttgatacttatttagactttgtaatcaagtatatggacaatgtttataagtgttctttacttaaaatatgaagatgcttttttattggaaatggattcttttatattgggtggacattctaaatatgttcatcatattaagctttatgaatgcgttatgtaaaacatttatatccttagaaaatatttatctccatttttcagtaactcatagagatgtgttcaaaattccactataatgttggattcacttcgtattcaggaaatttttgcgttacacatttttcggctgtctgattcaagactgttagaacttccaagtgacttgtgtttatctgtaagaaaagattccccttatctctaatacagttgattttgtctgatattaaggtcactatatcagctttcttttcttttttgcccactgtatcttttttcatgccactactttcaacttttctgtatcatattttagatggatctcttaaaaataacatataatttagtatttttttatttgattgttttattccagtgtgagaatctttgtcatttgacaaaacagtgtaatacgtttacacttagaactactggcatatctgaacacttttctaccttctaattttttaattatcattctccatttattttcctcctttcttgctttttattgaattatgtgggaattttcttctcttccttcgatttgttcaaaagttgtacattctttccctatttctcagttcattatccttatatttttagcaaacatattcaacatagttttatcaacctctctgccttcttcaaacaatgaaaggatcttagatcttccttttaatcttcttcaggtggtttttttgctatgtttctaattgtctgggtgttagttctcctatctgctgccttaataattctcattcatggttttttgcttctttgcctgtatcgtaattttcttatgagttcttccttgatgaacccgctttattgagggtttcttgaatagtctgagtgatcctaagaatagtgttctattggtttctcccaggagcacagtgaattctggaccactttatgtcaatttctcagtttgggattatcacaccatgcatataaattcagaatttatacccatgtttagtgcagacttgacattttgatttttcagaggacattgtctaatttttaaagatttacttggagcctgagacagaccctgtgctttcttacaatgtctccaagcccggagacaaatttttctttttgttattattattctaaacttggaggccatttgaggatcctggctatgtagaagggagctcaattacagccacccacttcatgcaatgccaaagatacacctcctttcctccagttccattagggcaacaaaaccttagtcccagctcacagctgcattcccaggtctgatggccccagccttcagcaaggctgccagaggctactgagggtgagaggggtactatgactaggtatctattattattggcatcaagggacttccatctacttctgctattaaactgtatgtgtagattctactaagaatttctatgttgtttaaaaagggaggaaaatccatattagtataccataacataaaaatcagattctgagtgcattattctgcttttcttgtttccttctaatctttcctccctttccactcctgacccaaactattttatgttcattctctcaactcccaggtctccccttagaagccaggtagagtaacagctctatgaagtttgagaaaacctgcccacttactgactccttgtggttgtggttgagccatgtagctctgagtagaaagaaggaggaaaaaaaagattcaggcaaaaacggggataggaaagaacaagtcatcaaagaaacttacagatatcatcaaatgtatttttcgtgagtcctcagttactcagtagagtaaatctctcaataatgtttcagaatcaaataaggcaacatctttggaatgatcctgtcaaattgatgaaaaaccaaaccaacttatatatgaaaatcagctttgctttctttctatttgaagggggaaaaaaaatccttggactaagaatatccctcaccaagagaaaagaagcagaaagcactgataattaggtgcaaagaacattcccccaaatgttcttaaatttcatagccagatacttttctaaattttttatcacattttctagggaagcattttctgacatttcctcctgttgagacagtttcctttcagtgattctttctgcataactttaagaggcagtctccaacaggttcccgctgcatgtggctttccttcttgggataatttgccaatggcaattgcattccttatgcactcagtgacctaccagtctgccctgggtcccacggactaaattctcaaactctcccctgaggatcagttttctttcatttttaatttttaaatctcttcatccagctgtattacttttgaccatcaggtctaggtgagattgacagatgctgacagtggttacagctgctgctagccactggttaccttagaaatggaggtaaaacaaacacaggaattccaaggaaccatacctcacctctaggtttctgaaaacattgtagagtaaataaatcacaaccctttatctatcagactgattctgtggctgaatttacaagaagaagcagaggaaagagagacggtagcaggggaggaacaaaagtcaattgttaccaatagttcggagacagaaagctctgagcttccattaagcagtttgatttatagcttcggatattatgtgcaagagcgcccacaacccaaagtgttttgtgtcttgacctgcaaaaaataagtctattaaccctaatcaatctcctattatgcagaggtgcctgaaatttagcaagcaaaagggtgactcaggtcttgcagcccaggaactaaccattgtctttggtaatctgcagtagctggggtctttgcagaagcaaaattatcattcagagtaaggtgcttgggggggtgtggtttcatcttttaatgagaaaatggaggattgttttcatttttaattgctggggctaattaaggcctagggctcttgtgtgaacctggacccttgcggatgcgtgttcacagacacctctgcctgtgcttcaccccagctgtgggtaacccgcctgccctgacttcctgctgtaattagtaagggcttctattccgattaagtacttcattacagaagctaattatgaagtctagctggttcgctgtgccttaggagggatttccttgtgctttgtgaggggaattctaagggtgggtgttattttaacctttgaagggcaaaatagaaattggcacatcacacggatggtcaaatgttaatatgggcatggaaaatggaaatatttaaatccacaccaggaaaaccaagcaaacaaagcttctttttaactaagatttggagagggggttagagaggaaataaatgctataattctatcaacacctacaaactgttataatagatccgtattggatccccaaacaaacccagtcctgggttgcagaatctgtactttgccttacatattggaccagagtgtaactgtgtaatagaaggtttacggtagtgaccacatatttttccttgcaatattctgttcattcgtgtgtatgttgtaaggatcactgagtctttctaactcaaatttaaagcattatgtgtgagtgtagttgggatgtagggtaaagtgagctaatgattgaaataacccagcctgttccttttaccaaatttggggcaagagtaaagtggagactcctagaccttgccttctgtggcaaggaggactctttccacctccactcctgtgagccaccttggtcacctcttgtgctttggggtggtaacacttataaaacagcatatctttgtgagggacgtccaagagagagactctagcaggccctagaagcaggcttgaggctgtcttgacagaaaatttcccaatgtcaggtacctggagctgagtggggtggggatgaggggaggctgctgtaggtggacatgaacctttggccttgggggttcctcagtccatgaggattgtggcaggaggagaaagagtgagcctgttaaatctccagttacagggcaagaccctgggtgcccaaatctaagggtgatgctataaataacattacaaatgaggttatatatgttcattcatttattcttcaaatatattttgactttctacaatgtcttatgaagtatgctgggtaccaagaatatgcaggtggctaattatgcaagatgatgtgaatgctttttaaataaaatttccagaacttatacaaccaaatgaatgcagtttctactgcttcaattattgtggaactattactctctttagaaattttgcttcaaaatctcaaatacatacaagaagactatgtataggtatataatgtatgtgtgtatacatgtgtgtgcatgtgtgtgtataatattcagagattttaagggtcccccctttctctttacagatgaagaaatcaaagttcaggaatggtaaatgttctgatcaaggttgttctgctggagtggtggttgatctcaagcttcccgcaagcctgttgactacagcattgatcagttcgcctaagtttcctgactgtaaatatcatggctgattctaatatcatgcacaaagcctgtcattcagagagatggtgctacaaattgttttacagttttagttgtgttcaaatcaaccaagtataaatcagaatgtcatcaaggctatgagctccacctttctaaatctgggtattccacttccgagaagggttttgtgcctgagaggttgatatctgcaactgtctcaaggctctaacttttcataaacactattgcaaactagtttaggttgtacaagagaagactttcttttaaaaatcaaaagtataggttttgattcatctttgcaagatgggagaaaaaagcagaaataaagtctagcctcccagatgacctcaatattggaaatgacccatgcaagcactttcactgagaagtgaataaaactaggataaattgctgccagatttagtgtacaacaggtctgattttgttgcttcacaactttttttctcatcaaacagtagagtggacttcgacatggagaagatcctgtcaaaacttcactcacactccctaattcagaggggtgagggcaggtagtggggcaaagagccatgatacacaaagtgcaggccactgccccccacttcaacctgacctaatccatcatgggagttcacattgcctcagccaaaataaatagagagacgcccttctgcacaacggagacttgtctagctgtgactgcctactcgtcacctctcaacatccactcaaacccccaagctactgaatgcctaatataaatgcatagcaaaatgtaaattttctgtttttctctcatctgggactacagaatttgggcaggaacaccccttcccacacaccaatttttgacagaacatattatcatccttattgcttaagaaaggaaagaactccctctacaagaatgggaccaaagaagaaaaatttaaagacttagaaaagatatcacatcggatgaaactggaaaccatcattctcagcaaactatcgcaaggacaaaaaaccaaacatcacatgttctcactcgtaggtgggaactgaacaatgagaacacttggacacaggaaggggggcatcacacactggggcctgttgtggggtggggggaggggggagggatagcattaggagatatacctaatgtaaatgatgagttaatgggtgcagcacaccaacatggcacatgtatacatatgtaacaaacctgcacgttgtgcacatgtaccctagaacttaaagtataataaaatatatatattttttaaaaatataaaaaataaaataaaataaaaaatttaagaaaaataaaaaaactgtgaggctcctgcacagtcaaaaaaaaaaaaaaagataccgcattcaaaaaacggtacctcactgaaaatttgacgcaaatccttctctgttaaataaatttgctacaagaaagagcagaaggttttagaaaactgctaatctgtgggcttaattttcaagtgcctattaaatttatcaatcctcattaagcattcctgaggagaaaatcatctccaagcaagagagatgggcattaaaaagattactggattaaaaatcactatgttcactacaaacagaagattagattctgtagaaaattgaattaaatagatgacaaatcccagacatttatccaatactcataggaaaaaaatggaataggtaaaagtgatgagggaaaaggtgagaaaggtggaggagtcagatctacaagatcctactaggaatattaggacagactgagaaaattgatagaaaataaaatgagtactaatgtagccacttagacatagcctccaagttatactgattctatcacttcctcccatttctgatgccacatcttcttcatacttctaattttttatttgtttcatttgtctattggctgcagtactttttctagtaaatgcctagaatgtgtccaatagtatccccatctcaccagaaacttctgtaatgtgcatttatctcatctcctgggctactgctgtgtgtcaggagccataccaagagttggaactatagcctcagcctgggcctccatttcaagatgtgacattgagtccccagttttaattccctcctctcctccatcctaaactcccactgatatctccaaaaaaacatgaaaacaggaaaatgtgaatgacagtgtattggaaaaaaaagatatatgtcatcaagggatcccagaactttggggaactgaggtgggaggatcacttgagccataggagtttaagaccagcctgggcaacatagtgagaccctatctctgcaaaagataaaaaattaaaattagtcaggtgtggtggcacgcacctgtaatcccagctactcaagagactgaggtggaaggattacttgtgcctatgagtctaaggctgcagtgagccatgatcatgccactatactctaacctgggtgacaaagcaggatatatatgtggagaccatctgtaagttacaagtaaacataggatcaaactcagacaggtacacaaatgtcagtacatcacaggaaatacccatctggagaacaagcagacagcagtagcactccatcacatggataaccaaaacaaaggagggactgcaacagctaagagtgaataactcacactaaatgaatcgttccaaagaataagggccaatgttccttctatactttactcactcaaagaaacagaagtgtactacatacagaaaaaggaaaccacctaagatcagaaaagactgccgattaacaaatttaaaaacaatgccaatggtcatcagcacatcagatacaacacaaaacactgattaatggattacattgtggcgaacccaccatgtttgacactaacagtaagtcatgttttaagcagtcccataatataacaaattatttttattagtactcatgagacaaaacaatgagccaggcacggtggctcacacctgtaatcccagcactttgggagattgaaacaggcagatcatttgaggtcgggagtttgaaaccagcatggccaacatggtgaaaccccgtctctactaaaaatacaaaaattagctggttgtggtggtgggcgcctgtaatcccagctactcgggaggcttaggcaggagaatcactggaacccaggaggcagaagtcgaagtgagccaagattgcaccattgcactccagcctgggtgacagagcaagactccgtcttcaaaaaaaaaaagaaataaaacaatgataataactagaaaataaatcataaatcacaatgaaattattcttttattttatatcatataatcccagtaaaaatacattaaaaataaatattatagtacaagaaagggaaaatgaattacacattttttaattacattaatgcatttttaaagggggataaaacacatgtttaacaattcttatattgctattatgtaaaccggaattgaacaattaaataaatggatagtggggcagtgggaatcgggtttcttgctgttggagtgggggttactaataaacaaggggaggaggcttgaattattcagtagagtgggagacgtcagtgtgaactcatgtttagatttatttagatacagatcattgcagacagaaacagaaacacttatatatgtgtgtatatatatataggttatgcatattcatatttcctcattctgtaaggtaagagagcctagaagcagtgacatccctgcagcaatgaacacacctagtgcccagatcttggtttctaataccattttctaataaacaaaaccagtgcttttgggagaaattgctgattctagaactcaggcataaaatatacaaaatgagcccagagtatatggtagtgcgagaaagtgaggacattctccaaagaaaaataaatgatggatgtcaaagggatataggagtccactggaaaacagcttccaatggtcaaagctggaataatttgagcaacaaaataaataaagtagtataatattataactcaaagtataaaataaatgttcatgagtcaacgccaatacaaataaacaaataaataaattacttggaaagaatagacaaatctcccatacataagaattccaagtaattcagggagatagggtggagcataactccccactccttaaatagggactgtgtatagcgtcttccttccaaagagtgcagtatggaagaggagaaaaagagtaaatttaccatagatgaacttggcagaaacgacctcagccacatgatcaaagtcaacatcaatagtgataagtaaggttgagggtatcaacaatgatgagtgaggctggatacgatgtgatgaaaatggcactttacctccgtaatttttctcctcaaaacacataaacccagttaatcatgagaaaagcatcagaaatatcccaattggaaaacattctacaaaatacctgatcagtaacccttaaaacaatcaggactgtcaaaaacaagagaaggctgagaaactggaacagctaagagcctaaggaaacatgataactaaatttgttttgttgttttgttttgttttgttttttgagatggagtttcactcttgttgcccaggctggagtgcaatggcacgatctcagctcaccacaacctccgcctcccaggttcaagcgattatcctgcctcagcctcctgagtagctgggattacaggcatgcaccaccttgcctagctaattttgtatttttagtagaaacggggtttctccatgttggtcaggctggcctcgaactcccgacctccctcgggtgatccgcccacctcagcctcccaaagtgctgggattacaggtgtgagccaccgcacctggccacgataactaaatattatgtggcctcctggacgggatcctggaacaggaaaaggacattagggaaaaacaggaaatctgaataaagtatgtgctttatttaataacaatgtaccaatattggttcattaattgtaacaaatagaacatatgaataaaaaatgttaataataaagcatatcgggtgtggagtatgtggcaactctttgtagtgtcttcataggtttaagtaaaactaaactattttaaaattaaaactgtgttaaaacacatgaagagataatttttaaaaagaccgcattttgcaagccttaaaaaatgacttgcacataaaatgacagaatataaataactcaagttcagtttcttcctcttcacaatcattatgctgctattgtttatttctaatataatgtttaaattcaggaagagccagtactattaaaagctggagagacaaagaaaacacaaataattctgaaagtcactacctagctctccaaacaaatgtgtatacggttttgcgtatatgtgaagcttatacagttatgcacttaatgatggggatatgttttgagaaatgttgtcatgaggcagtttcatcattgtgtgaacattatacggtgtacttaaacaaacctagacggtagagcctcttacacacctagactatacagtgtagcctattgctcctaaattacaaacctgaacagcatgtgacctgaatactgtaggcacttataacacaacaataagcatttgtgcaactaaatacagctaaacatagaaaagacacagtaaaaaatgtgatataccaaagaaatataaatcattctactataaagactcatgcacacatatgtttattgcagcactatttccaatagcaaagacatggaaccaacaaaaatgcccatcaatgatagactggataaagaaaatgtggtacatatacaccatggaatactatgcacccacaaaaaggaatcagatcatgtcttttttatttatttatttatttattttttgagacagagtctcactctgtcacccaggctggagtgcagtggcgcgatctcggctcactgcaagctccacctcccaggttcacgccattctcctgcctcagcctccccagcagctgggactacaggcgcacaccaccacgcctagctaatttttgtattttttagtagagacggggtttcaccgtgttagccaggatggtctcgatctcctgaccttgtgatccacccaagtcggcctcccaaagtgctgggattacaggcgtgagccaccgtgcccagccgagatcatgtctttttcaggaacatgaatgaagctggaagccatcatcctcagcaaactaacataggaacagaataccaaacaccacgtgttctcactcattgggagttgaacagtgagaacacatggacacagggaggggaacaacacataccggggctggtcagggggtgacagacgagaggagggagagcattaggacaaataactaatgcatgcagggcttaaaacctagaatacgggttgataggtgcagcaaaccaccatggcacatgtatacctatgtagcaaacctatacgttctgcacttgtatcccagaacttcaagtaaaatttaaaaatatactgaaaaattatggcttctgttcttatcataatttcttaccagacagcagactatttcaagaaaaaaataataacatcgtaaagtttgtaacatatgtagttgtaaaaatgtggcaaaaggtggtgagtaggtaagtagaattatactgtgctagagtactgtatttgtgaagtagaaaataagaagtagaaagtgttaagtttgaatgagaggtgggaagtgggaaaggaaactgcaaagtttcagatgtgaagtgaaaattagaagtatgaagggtcactatgaaatgtgaaatagtgccatattgactgtaaaaagactgatactttaattataccaatttttagatctaaaaaaaaactacattttttgaaggcatatttaagaagacaatgcaaaaactaaaatagaagagtaaaaaaaattttaaataaccccaaagaagacaagaaaaaagcaacagaataccaaaatcaggaaggataagtggggagaaaagcaaaatagcatacttaacagctaatagcaatgttactgtaataagttaaagatatatattgcaaaccttattgtaaacaccaaaaaaagaagtatagctaataaaccaacagtaaaaaaaatactcaatccaaaagaaagcagaaaaaaataattaaaaaaagaaaataccaataagcaaaataatagaaaacaaagagtgaggagataattttttttattcacctgagtagtccaggtgaactttcatttatttagattttaattttttcaaattccaaccagaagctaaatacaattgggaattggttagcactatttttgctccaaaggagtaggatcatttagatttactccaataaaagcaaagcttttcttcatttaaaagaaaaaaaaacctctatatggtagtctttcctgatgttaattgcataaaataggaaggtaaatgtaaatccaaaccaataatttaacatttcaattaacatttaacattctctataagggtagggggaaaaagacaatacccaactatatataaaatagtatatgtcatataactatattaaaatattatgtaatattagttacatatgacacatgagtagaaaatggagtaactacaacactagagaaaatagacatcagaacaaagattatcaccatgggtaaaagagacatttcataatgataaatcaatcaattcatcaaagagatacaacaaccctaaattagcatacattcaatgacagctttaaaatgcatttgaaaactttaataactgaaaagaaaataaattcataatttctgttggagatttaacattcttcatttaatagccaggtaagaacaaatagatcaaaaatcagtaaggatataggatacttgaataaaaagattaaccggtgaatcagatagaattggcatttgtagaacactccacccaataactgcagaatacatatttgtttcaagtacacatgaaatattcactaagataagccattttttggccataaaatgaatctcaacagaattaaaagtatttaaataatatagtatattctctgatcacgacaaaattaacttagatattaataactgaaaacgtatctagaaaatccacaaataggccgggcgcggtggctcacgcctgtaatcccagcactttgggaggccgaggcgggtggatcatgaggtcaggagatcgagaccatcctggctaacaagatgaaaccccgtctctactaaaaatacaaaaaattagccgggcgcggtggcgggcgcctgtagtcccagctactcgggaggctgaggcaggagaatggcgtgaacccgggaggcggagcttgcagtgagccgagattgcgccactgcagtccgcagtccggcctgggcgacagagcgagactccgtctcaaaaaaaaaaaaaataaaaagaaaatccacaaatattcagaaattatacaacacacatataaataatccacctattttaaaagatattaaaaataaaattagaaaaattattgaactgaatgaaaataaaaacatagcatatcaaaatttgtaggaaacaggtaaagaagagatgagagggaaacttatgtctttaattgtgtatgttagtaaaatagaaacctctaaaatcaatatcctaaacctctcctttaaaagccacaaaagataaatttaaatttagtaggaagaagaaaataataaagatgagggtagatatcagtataatacaaaattttatgaagaggaaatcaaaattggttttttgaagaaatcaatggaattgataaatttctatcaggattaataaagaaacaaagagatacaacatgaattttcaataccaggaattaaagaaagaacatgactacaaactttacaaacattaaaagaataataagaaagtattttttaaaacttcacaacaatatagtcaacaacctagatgaaatggtcaaatttattgaaagacaaaaattatcaaaactaactcaaggagaaacaaaatgtctgaatattctgatatttactaaaggaattaaattcataattaaaatctttctatacacacaaaaaaagtccaagcctggttgtcttcactggtgaattctaccgaacacttgaggaaaaaacaagatcagtcttaacaccaactctttcagaaaatagaggaggagggaatacatcataactcatttcacaaggccagttttatcctgataccaaaaccagatgaagataatacaaggcaggacgggtgcagtggcccatgcctgtaatcccaacactttggaaggtcaaggcaggcagatcacttgagcccaggagtttaaaaccagcatgggcaacatagcaaaaccctgtctccagaaaatatacaaaaattagccaggtgtgcagggcgcggtggctcatgcctgtaatcccagcagtttgggaggccgaggcggttggatcacgaagtcaggagatcgagaccatcctggctagcatggtgaaaccccgactctactaaaaatacaaaaaaattagccgggcatggtggcgggcacctgtagtcccagctgctggggaggctgaggcaggagaatggcgtgaacccgggaggcagagcttgcagtgagccgagatagcgccactgcagtccggcctgggtgaaagagcgagactccatctcaaaaaaaaaaaaaaaaaattagccaggtgtggtggcacacacctgtggtcccagctattcaggaggcagaggtgggagtatcacctgagcctgggaaggttgaggctgtagtgagcaatgatggggctactgcactccagtctggacaacagagtgagaacctctctcaaaaaaaaaaagatattacaaggtaaaattagataccaatatacttcattaacatagattttttaaatcctcaacaaaatatcaacaaaattaatacaacaatatataaacaagataatagaccatgcccaagtgggatttttatccaagaattgtatgttggtttaacatttaaacatcagtcagatttgaaacaacccaaattattttcaatgggtgaatggataaataaatttaatgcatccatacaatggaatattactcagctatgaaaagaacaaactattgatgcaggcaacaatgtatatgggtcttaagaaaattatgctgagtgaaaaaaatctcaaaaagtcacatactgtatgatttcatttatacaatattattgaagcaacaaaatcacagtgatggagaatagactagtggtttccaagggttagagttcagagaaggtataactattaggcagtaacacaagagagtttctttgtggtgataaaacagttatgtatcctgatggtagtgatggttacaacaagtctatatatgcgataaatttcgtagacctacacacacacacacacacacacacaaacacacacacacagaaaaagagagagagagatggtcgaattcaaattctatagttgaattagtgttattgtaccaaagtcaatttttttattttaacactgcactctggatattatcatgaaggaaatctgggtgaagtgcacacaggaactcttttctattattttcttgtgtcttaaagtattccaaaataaaaagcattaaaaagagcaaatacaacgctattaaaagtagctttacaaaagaaaccagttataataaaatgcagccatcaaaatattaaaaatcaaatttgtgatatagtaagaaaacatgatcattgtatttcaacatattaacagaataaaggaataaaaattgattatctcagtagatgcagataaagtaaatgacagaattcaattataaacagaaattccagcaaactagaaatagaaatttcctcaaaatggtaaagaacgtctatgcaaaatctgtagctaacattgtattttatgacaaaagaaactgaacggtatctctagagattagcaacaaggcaatttgaacactctcttcactatattaaggcaaggtattcgcctctgttaaacaatctactggaggcctatgctggtgcaaaaaggctttaaaaatatacagatcagaaatgaagaagtaatattatttttttctcaaaagacatgattgtctgcatatgaagtctattgaaatctacaaaaaacacgctactataactgttaagttccaaggacacaagttcaatgcacaacaaaatctattatatttctatatattagctcagactacgagaagctgaaatatacaaaattactacttacaaaagtatcaataaacatacaaatacttagggataaatttcatgaaattctacaacacctacatttttgaaaactttaaaatattgctgagagaaatctaaaatcatttaaataaatgtagagatacagtataccatgttcatggatgagaagattcaattgttaagatgtccatttttctcaaatttttctatatattcaacataatcccagtcaatatgccagcagtattttctaaagaaatgggtaagatgattgtaaaatttatacagaatttcaaaagaccaagaatagtcaaaataattttaaatattgagaacaaagttgaagtatagaaaatcaataagggtataaaagacttgaatatgactatcaaccaacttgatgtaattgatttttatagaataatccagtcaataacaacagaatatactttcttttcaagtaaacagaacatttaggaaggcagaccatatcctaggctagccaacaagtctcaatcaatctgcagtgatttgactcatgaagtattctctgactacaatagaattaaattaaaaataaataataggaagataaccggaaaatctcaaaatatatgaaaacaaaatagcacacttctatataattcatgtgtcaaataagataccaaaaagaaaagtataatgtttttgaaacttttgcgaaactgagatacttattcctattttacaggtgaaaaaaccagttctgagaccttaagtgttctgttcaaagccacatgactagagtttgccagagctggaattcatattcaagctgtggtggttcccaagcccaacatgctatcctatataactagtcactaatatataattgctcctagaacccaggatatatcagaacttaattggtagtagtaacagctaacaattattaggcaattaatacaataaggcatttcttgcatagtaccttatcatatagcactttgcctgtattgattcatttattactcagtacaactctatgaggatggtactatatctattgtcatcttataaatgaggggactgaggtgcagagaagataagtaacttgcctagacagttagttaaggtagaaccgtgacttaaacccaagcagtctggttccagagtttgcatccttaaccaggatactgtattgccttcagattgtatgtgtatgtggtgagaaggaggaagagtgagagacaaattgtgtttttaatgaaactagtgtcacattacatttgtcaaaataaatttataatttatgtgtcaaaataaagattatatgtaaatttaaaatattagagacatgaataaaaatatcaatttaaagtgtcaaatatatgtgactatctgacagaagaaaagaggtctattcataaatattattaaaaaatcaatatccagtccttcagtattcatgagggatgcattacagtacacccacagataacaaaatccacagattctcaagtctctgatataaaacaatgtcatatttgcaaataacctacgtacaaccccttatatactttaaatcatctctagattacttataatacctaattatagtattaatgaatgctgtgtaaatagctgccatgatgaattgtttaggcgataatgacaagaaaaaagcctgtacatgttcagtatggatgtgaccatcctttttttcccacctgaatattttcagtttgtgattggttgaaccaacagatgaggaacccatgaattcggaggtccaactgtacaaataacactaaaatttaaacttttgaaacacagaaaatgaaaagatgttttttggttagaagattaatagctataatatataaataggccttatagaacaatcaaaaagaacactcatttattctaatataaaaacaggccatgaatataaacagacaaaataacagaagagttagaagaggccactacacataatgcaaacaaaaagaagaaattccagtaaagacagaaatgcaaatttaaaacaaatatccttttgtccacgtttgtatggcaaagataattctgtatttgttttcaataagtccttttgcttttgttgttgtgttcaaataattcttttatgcaatggaagaaaaagtatggccttactcatatactgcttacaggcttgtcaataatataatttttctagtgtttacattgtcaatatgcattttgaaagcctaaaggccaggcgtggtggctcatgcctgtaatcccagcactttgggaggccaaggcaggcggatcacgaagtccagagatcgagaccaccctggccaacatggtgaaatgctgtctttactaaaaaatacaaaaattagctgggcgtggtggtacatccctgtagtcccagctacttgggaggctgaggcaggagaatcactagaacttgggaggaggaggttgcagtgagctgagatcaagccgcttcactccagcctggcaacagagcgagaccccatcgcaaaaaaaaaaaaaaagcctaaaacatattatatcttcatatcagtaaaaactttatgaatttgtaatgaataaataatcagtgttgcacaccaagatttacatggagagatgttcttggcataatatatgatagaaaaataggaaataatctatatgtacattagaatattggtcaacatgatcaaatacgtacagaaatttaaaaccaaattttacaataagttttggaaatttttaaagaatgaaaaaatgtgcaggctatcgtatgcaaaaacttagcttaggtagaacatgaacacaattgtttatatataaagccaaaaggagacacatttttaaatggaaagaaaggcaaaactctaacatttatctctgggttgtgatattttgcagtattattattatcatttttcagattttctatcatactcctttgttattataatcagaaaaattataaattctttcttaaaatctccacttataccctccacctgggaatggtgtgcgattctttccctcttaatattagcctaaaaaataaaacagctgcaatgcatttatgttgtcattcctgactccagccagattgaacctggccttaaattgacaatgatcttgtaggagtaaaatttcacctgtattccttgccagaggaccagagctttttagaagaattccttagaaaatgaaaaaaaaaaaagattcaataacttcttgagacatgtgcattccttccagagcatttgtgaggagtgttcagctgctgcaaacatcccatgaatcctcagctacttggaacaggtgtacaactctgagccacggtggggaggcagactagcaataaaagagggctacagcagcctcagcccccatgtccatccagccaggaatctccagttgaggtttgtatacaccagggaaagaaacttaccatcagtcatggattttgtttttagtggataaccattttatccatttttgaaaatgcaagagtcttcagacagttggtttctggatgaaatgataacaaaagggacagatggatgcaactggatctcagagggcgaagtgttgctacaagatcttcatcgatttgctaagtgtgtttagtgacaggccctcctgcaaccaaacagaatgagaaatggaatctattagtggagttgttaaagcatccttgatctctgtggatgacagccaagtgtgtgcctttttctataaacattaaatcattctcacatgagagagaagggttaggggaggatgcgagagaatacacacactactggaaaaagtctgaacagtgattgctttattttggagatgacattgagaacacccgaagttccagttagaaacacttggagatttatttttatgagttttcatcctcaggaattatttatagggcaactcctgagacaaagtaataattcaccatggaccatgggactgtgtctatgttctgaagccttgataataaagtattcattttttactatgtctatggctgtgaaaatgaatgctcaaagttagtgatcagtaggaactctgtcatattaattcataggcttgccagttccaaaattaatatggcttcgcctgtgtgcgtagagcttcctgggttcacctatattaacattgccacaccttgtaccatgcatcacatcaagtggagaacataattttatattggatggatgaaaaagaagaatgtggtccttccagtaattatcttagtgccactgatccttgtaacaaacccgagtagtgaagcatgccccatcagtaaattaggcttatgggtaatcagtaaattagagttagtcatgctgagatggtatttgacaatgatggaaaaacttcactgccagacaaagacaaatgcatttatcatttgtcagggctttgatctccagacccttgctatcttcagacacacatgccaatcataaacttctagacttggtgtcaagtcaaggcagtttaatttatccagcagtcctcagatcattcagatgttccagttaaaagtaaataaattatactatttcatcacagacccatattgggtcacaaatataattatcagattatgatttcttccaaatccttttatgtttccaataattattatttttgtaaaggctgcacaatgaccacatcgcacaggtgagctcctcctagctaacattccaggagctatagcatttcacttgcatattattattgatttttgttccatgtgcatctctggctcttattgttggattgcattctattgtcaattcacaaaaatagatcaaccactcaaaagtcaacgattgatcataaaagcattttgagttttctttagccacatgaaagaattctttctactaccaagtctggattccaagtttcttttcagatagagtcttgcttttcttaccctcaatatgaatggctacatttacagtttgagatatgcctgtccagagctcagaaagtaatctctcagacctgatcatagtggatttctggtttctgttacttgcatttcagggttttacactaagaggtctcacccagtgcaaaagtcatgctctccccagtggggagaaaaaaggtgtgcatgtgtagtgtggaggaggttttgcaaatgcagagtgaaaacatttgcgggggcagtatcctaatctgctttgtgctgctacaacagaatacctaagactgggtaattataaagaacagaattttatttctcagttctgaaggctgggaagtccaatatcaaggcaccagttggttcagggtctggtgagggctgctctctgtatccaagatggcatcttgttgctgcatcccccagaggggagaaatgcaatgacctcacatagcagaaggtgaacggcaagctgacccaaggctgcgtgaagcctcttttaccagggctctaatcctagtcagcgaagaagccctccgacctaatcacctcctttttggggggaggggggcagggtttggggggaatggagtctcactgtgtcgccagggtggagtgcagtggcgcgatctcggctcactgcaacctccacctcccaggatcaagcaattctcctgcctcagcctcctgcgtagctgggactacaggggcacaccaccacacccaggtaatttttgtatttttagtagaggcagggtttcaccatgttggccaggatggtcttgatctcttgaccttgtgatccgcctgcctcggcctcccaaagtgctggaattacaggcatgagcccggcctacttcttaaaggacccacctcttaatatctttgcattggatattaagtttcaacatatgaattttaagggtggcacattcagaccatagcaggtaagatataaatcaaactattaacaacagttaactttgaggagtggaactgagagtgatgtgagaagagaagaaatttgacttttcatacaatttttgtaccattgtcacaatttattcattcagatgctgtttactgagcccttgctgtgagcaggtgtgaacatccacaagaaagacaaaggcctctgctctcagtgacctaccttctagtgggaaataaaaggagtagacacataaacaagcacatttgataaatacacattggaaatagcaccatgagaaaaataaatgttccacagggacctgctttggaaagaattgatcaaaaacatctctgctatctcacaggagataacatttaagctcattttgttcaataaggagacatcatcattccagggagaggaataatcaacagagaaggaagagcaaatgcggtgcctagaagtgaaaattggtggagtgtgtgaggagctgcaggaggccaatgtcccagagagtagaaggaaaggggagagagattgacacaaggtggggaggtgggtcggtgggttgggagcagctctaacacaaccttctgggacatatgaacagtttgaattttattcagataacacatatatcctttaaaagatgcctttgaagaaaaagagaaagacacccagccccaggtgtgaccttggacctgaagcatttgtattggcaaccccattccttgggagggatctcagtgtgggggtggtacagaccacaaagctggagacagcagggcctccattcatattctggaacccaaggagaggccaaattcagtgggtgatgcagatgtggactcctccagggcaggggattggtttggccatccgggcatgccccgtaaccactgctgttcttgatcacactacatgctccataaatgttgcccaaactaaatgagaatgactatggtattttctaacctgtttagtggcatgaagaggcccatgatgatgcaagcctcagttggaaggtgagttctttcacctacttttgtgaagacttcctgaacatcaggggttcaaactgacgacaaccctccttctgcatgaaagtccttggagccattaagtgtcaggatcattttcctattcatccattcactgactgactacagatcttagcagggaagccaaatgccagttccatttgaagagattggaggactatagggactggccacaggggaaaggctctggcttgacctgaccctattccccactatacccaaaggctggagcaagcataaaattgaaagtttctgcttcatggcgcctctcccaagtggaggcagaagtgaattcagaccctacggcagctccacaaatgaaccctggatggtgcaagacaagcaggatgggaaggttttcctctcacatgagggaaacctctaacccatttgagggcagtggaaccagctagaagctgcaaccatccatgttgaggataagtgcaacttgaagataaagcaaatgtcccattctctcactgaagttgacggtaaaatgcaaaaggcaaagtcagctcttctaaataagccagaaagagtcatagactttgctccatcatgctacaggcttgcaggcttgataaggctttctgtcactaacaccttgtgtgaatgtatgcaggtcactaaaatacttggagtgttgaattcattggctataagacaaaagaaaaatcacccactgctccctgtctcctagggtgagtcctaatcttcaggtgataaaacgtcaggcaggttcctgggacccacagagggcggtggctcaacctaggagtatctctcaagtgagaatctcccatactctagataacacagagcatcatggcatcccttgttccttaggaaatggggtcagggaagaggcagctatagctaatgccctcttttgaacacaaggggacaactgcatgagcattcacaaatatttgttatgcacgcttggatccataagggctatgctgtgttctcaaggcaaagagataagtcctctaccttctcaaaggtcacttgtgtaatagggacacaggaaatgaacacaaaaggatgaataacataaggtggccaagagtcgcaggatcagacaaggaacaaccatcagtgttggcttcatggaggaggggagcgtgtacaggggcctggagacaggctgggatggagacaagaagaaggctggtgatgaagatgaggctcagcaagaccagggagatacatcttagggaagagtggtgtagtagaaatcaaagcatcagagtgaaaaggtgtgagagctgggattggagatgtggtgcgggccaggctgtagagggctttgaatgacagagtgacatgcttccattttattctgtgcacaaatggaaaccactcaaaggctttttgatcggagatggtgatgtgcgtcaagtcgagttttctgtttgagagggacaagtctgaagacatggagttctggcacaagacaatctagactggaagtggacaagggtcttaattagagaggggtgggctggattgggaagggaaccatccaaaacatatgacttaggagtgatcttatttgctagtagtttaagatgtattaagtttcctacctgaaaatgtaggaaagaagccagggatcaaagagaacattgaaatatcaaacctggatgactgaagtggtgacacctaggcaggaagtgggaaaatgcagagtgggagagagactgctgaggagcatctaaaataagggacacaccagctacaagcccaaatacaggtacggagggggacaaggataccctgcagggtgaagaagacatgctgtgaggtcagagaccatcagggctgagtatttactgcatttttttgtttgtttgtgttttgttttttgagacggagtcttgctctgtctcccaggctggagtgcagtggtgcgatctcagctcactgcaacctccgcctcccagattcaagcaattctgctgcctcagcctcccgagtagctgggattacaggtgcatgccagcacgccgggctaatttttgtatttttggtagagatgggactttgccatgttggccagactggtttcaaactcctgacctcaggtgatctgcccgcctcagtctctcaaagtgctgggattacagacatgagccactgtgcccggcctttacgatgtgttaaatgacagacaccacatgcacgcagacagtcttggccatcacagaggaccctgtctagtaaacaaaaacacagaccgggaaaggtgaggaatcacagagcatcatgaaagcaaatgcccccaagttcatgctctccactagaaggtaaactccatgagggcagggacctgggtctatcagtatgcatcaccaacatggagaacggtgcacagcacaggacagtgccccataaacctgaattggacacatgcaatgcaaggataattgagcaaagggagtgaagagagagatggctttctgaaaggaaggaattgagagtcgactcatgaaggggactctgtactgggataagatggggtacagaaaatgctaccttaaaatataccttggcatactgaatattttaagctgaaggaaattgcagaagcagaaagatctctcttaccttctcccacctcctcttttctgaagcaggccatataaaccggcatttcccatgccccttcttccctgaagcaggccaaaaacctaggaaggtctctctctctgatcttctccctctctccttccctgaagaccctgatgtggcaggtatcctgctccatatccagaaggagggaaggtcacacagagagggcaagaagaatctgaataaacaggccttgctaagttgccctcagtttattaccattcaatcataccttttgtcccccagttatacttctgcagggctgcccataaaaatacatgattttccctggatctctaggtcttcgtttctttttctatttttcttttttttttttttttcatttttcaactttcatgtgaaactcttggggtatatgtgtagtttggttacataactatgttgtatgatgctggggtttgaagtacaattgaacctgtcccccgggtcgtgagtatggtaccaaataggcagtttttcaactcttgtctccctctctcccctgtcttgtgttccgccatgtctgttgttcccatctttatgtccatgtgttgggtcttcatttctgaagtttcccgtgtcatgtacagcttatgttaaataaatgtgttatgcctttctcttattaatctatattttgtgacaggggtctcagccgtgagactcctggtgatgggtaagaagaagatattactttgtatcccctacagataggtagcatgaaaggaagaatgcattccatgtaagggtagtgacttcagagatgacacaaacatagactgcagtaagcatcaagagaaggaagggaagaggggaggaatatgatctgcccagaaaaagggacttataagacccccaaagtcaaggtttccttcagagtgactcagagaacttactgtcattttgaggaggtgcatattttagtttaaagtctccctaaacacaaagattccggtacaaagaagaaaactgggctagctgagcgtgaaactgttcactatctcatcaattgcacagtgatcgtcctattagtgtacaacctgatttctcatcttaataaaccttggccaagagaaaagacttctgaaattctgaggtgtgagacctcaggaaagcttcttgatctccattttcctcagaagacctgcacacaaagagaacatgagaacagatggcaaccaagcctccccacatctctgtcctgtcctagaatctcctttgtccaatcctggctgagcttcctgagctcaaagcagagaatgaaacccagcatctgggaggtcctggagaggaagggctttttaactgccgttcctcttacagtgttatgtttggaaaagagactctgtgaaaatgataccattgatttcacctatttattttctctgaaaggctttcatatcaaatttgctccctcttcagatcaaacatgtctgtgggaagcaaggcttagaaaaagaagttacaaaagtctgcctctctaaagagtggttctctgatacaaagagaggcccacggaaaaggagggagaatggtcactttgccggtgggctggcttcccttagaacacgaagagaaccaagacgccaccccagcccaagtgaagttcttctgcagcctcatcttcagagaatctcagggaagcataaaatggcttttgatggcaattgatctacttcattcatttggtaaagtttctgaccccctcacgactcagaacgtcagctttcccataaccacactaatgggttgatagctgactatctctccccagcattgcagattgcccatttctcataatatcctgaggttcagaaggaagaaatatgttaatgttcacactgtccaaaacatagtagcaaatgaagccttgctctttccaaaatctgtactgttaatggtgacacctaagtcaccgttctatttattctatgaaaagttgcttagttaagatttgttttgtattatcaaaataaaaactagagacaatgaaataccttacacagtatttcttccggcccacctctggccaacctcatccacctctaccatgatagccccctcatcgcatcttgcaaagaatgactgaaggtctttggagctcccaaacttgcaggattcaagtccctatattcagctcatcttctgttccactcaagtacttctgagctgcagaggttattgattgaccaactttcgccgacctgtattttgcaaaagtatatggaccactttatggattaaaggattagagaggccaggctcagtgacttacacctataagcccggcactttcagaggccagggcgggaggatcactttagcccaggagttcgagaccaacctgagcaacatagtgagatcctgtctctacaaaaaaaaaaaaaaaaaaaattaattagctaggtgtggtggtgcgtacctataattccagctaccagggaggttgaggtgggaggaagacatgagactaggaggtccaggctacaatgagccatgatactgcctctgcaccccaaccagagtgacagagcaaaaccgtatttcaaaaataataaaaagaataataaagaagtccaggccaggcatggtggctcacgcctgtaatcccagcactttcggaggccaaggtgggcagatcacgaggtcaggaaatcgagaccatcctggctaacacggtgaaaccctgtctctactaaaaatacaaaaaattagcctggcgtggtggcaggcacctgtagtcccagctactcgggaggctgaggcaggagaatggcgtgaactcaggaggcggagcttgcaatgagctgagatggcgccaccacactccagcctgggcgacagggtgagactccgtctcaaaaaaataaaaaaaataaaaataaaaataaagaagtctgggagcagtagttcatgcctataatcccagaactttgggaggccaaagcaggtggatcgcctgaggtcaggagctcgagaccagcctaggcaacatggtgaaatcccatgtctactaaaagaaaatacaaaaattagccaggtgtgatggtgggcacctgtaatcccagttacttgggaggctgagacaggagaatcacttgaacccgggaggtggaggttgcagtgagctgcgacagagccattgcactccagcctgggcaacaaaagcgaaactccatctcaaaataataataataataataataataaataataataataaagaattagagtatgactttcagtcttggccaaacagccaagacagaagtgcttacaaaatgtgtctcctgcaatggccaggacacagtacccagctggttacttattgaagagaacacagcacagaggtttgactggaggctttttgaggaaagcaggatgctgggaaactagaactagaggcgcaacactgtaattctacagctgtctgactattggctgagaaacaggcaaggaacccgcctttacagaagcacgagtcctttctcattctttatatgggtctggaggtgtagtaggtgtggaccagacctgtaccgtgggaagactgaaaggcagaagcaccagacaaccctccccataaatttcagcatttaaacaccagcatacatgtgctgttagaggaataaatctgacaagcatcatgtagaaacactggaatgtgaccttaatgaatcctgtaacttgtttcaaatttgagagataagttacagtttctgattttgcaggactgtttccaaattaggaccaacgatgtcctaagaatggttaataaggacacattctggaaaatgtttaaggcagttctgtccaacagaagcaaaatgtgagccaccaatgtatgctactgatgtcatttttaattttctagtagctatgttaaaaatagtaaagacaaacaggtgaaattaattttaaaagtatattttatttaacacaatatatccaagatattgtcatttcaacatgtcaacaatataaaaataattattatgggctgggcacagtggctcacacttgtaatcccagcactctgggaggccaaggtgggcagatcacctaaggtcaggagttcaagaccagcctggccaacatggtgaaaccctatctgtactaaaaatacaaaaaaaatcagccaggcatggtggcaggtgcctgtaatcccagctacttgtgaggccgaggcagaagaatctcttgaacctgggaggcagaggttgcagtgagccaaaatcacaccattggactccggcctgggcaatagagtgagacttcatctcaaaaaaataattattatattattatgaaatttagctttccttctactaagttcaaatccagtgtatattttacattcccagcatatcacagttcagaccagtcacatctccatggctcagtagcgagaggtggccaagggctatcacattgaagattgtatttctaatctgttatcagtatcattggacttaatagctgaaacaaacaaacacaaatagctgtcaatataataaagcgtaacactggtacagaataattgtttgaagattagattctccagaaggtccaattcatgttctgaggtttacagccttcattaacagagctgatgaaaaactaaaaggacttttcctcacccaaaaaaaaaaaaaaaaagacacactttttttttcagtgtacagaacaaaaggaatcagctaccatttgttaggataactcaatgcaggttatccatggacctctcaacttgaaaaatcagatgtaattgcaggtctgttatgtgtaagaactgtcagtgacaagcactcatatcagaagtatgggcctattttagcgaagcacttcatgaatgcgtacggcatgtctacaatgagtttcttagccattaccagtaaaggtcactatttcctaattcagaaccagaagatgactccccaagtacctctttgggaagagaaggaagacaaaaacaaagaaaatccccggagcccagtaatcacagccagagtcaggaaggcctgaaacacattgtttggttctcatcttacccattgtggctgtgcagacagggacagcccagtattccaatggaagggacacagatgcaccagaccagattgtatgaggctgtgtaaacccagtaccaagtgtgaccagacaatgccaacacaagggtcaaaacactggtaagtcaacacagggccgtcgtaacaacccatttgtgctaatgtaatcaatgaatggctaacctggtgccaaaagaaatgtcatttaactgcatggaaaaacataattcaatttaaaaagtgatggattgaggagccaaagaaatacagtttagccatgtattcaatagtttcaggtaaatgaaatagagtaattggcaactgactttaccagggcactgttattcctagacccctgcagtgaatggctttgtacttgtggcctacttgtcgatgctccctggtcgcatggaaaactttcctttctagttgaccctcatttgattttccttaatcctaatacagatccctagcaagtcccgtagtacctttacacctgcagaggataaaaaatgttattattattattttgtctttttatcagtggctcctgataagtatactgaattttaaaagaaaaaaaatgcaattcaaaagagacaaggaagtagaaaaacttgaagtatcatgggaatctcaatcagtttaaattggatatggttttgagcaaaaacattaagttgatcaggaggtaaagaggttgaagtatgcttcatatgacactactctgaggaatttaaagagagaaatttagaaaaagtggtgctgagaaggtatccgagagaagtttggggattaaattctcttaactggctgtgatgtaaatagggatattctgaaagaagcagtatagaggggaatatgacttacaatgatatacaatgtaagtggcatttaaagtagaagaagctgtagtgtaataagatccatttacacctgaataaagtttaaacagataaaccaagactatgaaaactgggtctcaaataagatcaacattgaaagcagatgtgaaccgggcacggtgctatgcacctatagtcctacttaggtacttaggagacttaggctggagaatcctttaagcccaggagttcaagtccaacccgggcaatgcagggagatcctgtctcaaattaaaaagaaaaaaaaaaaagcagatgtgctttatagccatatgttaaaaatgctgaaaagctaacgttttagttgctgtttgtctaagtagtcacagtctgtaaatgcaccggtagaagcagatggtatccctggatgcaaagctcacatggaaaacactcctctctacggtcatccctctgttcctggagagtgggatttgcagagcagattattcactgtagtcactggcttcctagatcccacatctgttcttggaagcccttagaagagaggtcttgaaatttgcgggtgttccagctcctctgactacaattggcacagaagctttcttcttcctgcgaacttaacacttgtgttatttatatttctatgcattcattaaataactatttatcaactctgtcctgtgtactctacaaggcaccaggggctaaaacaaagaactcctcctttcctcttgatctccttgatagagaaggcagacattaattaattaaaatataaaatgtaactgtgacaaaagtttgcaagtaaagagttggtgctataagagagcctaaaagaagggcctgccttgctcaggggtatgaggaaagacttctccaagttgcagtgcagtggagtggtctggaaggtgaacaagcttaactaggtgaagagcagagaaatgaagatttcaggtagaggaaacaggatgtgcaaggactcagataggaagacgcatgctaaaaggcaagaactaaaagaatgaagtgtgactaggagggaaggcgggaattctggaaatctgggcaaaacaatagtgacctagacccatgtagtagcagacttggaggaaacacgagggggattggagaaagaatggaggagatttgatgatagattagcaggaatatatatattagtgagggttctccagagaaactgtaccaataggatatagacagagataaataagacaaaatttattacaggaattggcatatcagattatagagagcaagaagcccaatgctatgccatctgtaaagctataattcagtccaagtccaaaggcctgagaaccaggagctccactgtccaaggacaggagaagatggatagcccagctaaagaatagatagcaaatttgcctttcctccacctctctgttctgttcaggccctcaacagattggatgatgccaccacattggtgagggtggatagttgttccatctactgatgcaaatgctgacctcttccggaaactctctcatagacacatccaaaattaacgttttactggctatctgggcatccctaatccaagtcaagttgagatattacatcaaccatcacagtacctcaggtgacagggaaaggaaaaatcaataatcactcctatactatattttcaagttgaaaaactgagaggtaacatattctgattcgggaagccttgtggctgtgtgttgggaggttttgtgttgtgttgagaatgggaggggttttagaggagagataaaatgaataatttcacttttatcatgttaccttccagttttttctgtgatgttctaatggataggtcaagaaagataagtacatttagactcagaggaaaggtcttggtctttaggtagacatttgggaactaacaatatcaagatggtatttaaataaggagaaactgaaaagctcatccaggacagatttcagagacaaaaaaagttcattctaagccccagggaaccccaacatttagaaatttggtgaagagagaaaaacaagcgtaagggaccaagaaacaggagtcagctcataaaagagaaaaatcaacgatctttcaatcacagcaggcaagaagcaaaatatttcaagaactacgtggccgtcaatgccaaatgcctgtaataataatacatgtttgataaagacaaagaggcgcccactggatcaggaaacatggaggtccctggggcccttgacaaggccgtttcaatcacatgtgagaggcagagctgtgatttagagggtagaagaacaaatatggggcatgggggcacgtgcctgtagtcccagctactcgggaggctgaggccggagaatcgcttgaacccgggaggtgggggttgcagtaagctgaaatcgtgccactgcactccagcctgggtgacagagcaagactctgtctcaaaaataaataaataaataaataaaattttaaaaaaagaacaaatatggcagggagtgactgagcagaggcagcatgtatgagaaaaccttttgggtgacatttggctactaaaggtaaaaaggaggggttaggctcaaggaaagtctctctcttttttaatgagatatacctactgtttgtcttcatcagtggtgcgttggtaaatgcttaacaatgggcgctcagagggaaagctctgttgtgtagcattagccagtctctgcagtgtaaatactctcacggggtatgtaatttcaagctatacatgtgaaatcactggatgtggacttgggaagagatgctcagaatcggctcctgcaagccagtaccacctggctccagcacagctctgctgttgatgtttgcattttaggggcatcatctggtggagagcaagggatctgcaatacagggcatagagcccttgcaaaggatagagtggaagggattcagaggacaagagagagtaggaacattcctccattgtaataggagataaaaggaaacaggtgcaaatgtaaatgttgacagaattcccatccgtcctttttcttcataaagaaagagtcaagatcatcagctaagagaggcaggggctcagaaatttaagcttaatagaaaacatttgcaatctttattacacatggtgggacattgaattggatttttattttacaagtatggtacaattttcataatgaaactctaagctatttgagggcagagactgtctgatattctcatttgtattctttgcatcgcctcacactgtattatacacatgattaggatcaagaaattcttattcattgactgaccttgaaatctggggttaagatctttttctgggatgaaaccgacatattttataaactcaccactccctgagcactcattattagacttcaataatataatctccatggtgaaaataaacataaaaattgaacttaacggcagggcgcagtggctcacacctgtaatcccagcactttgagacgccaaggcgagcggatcacgaggtcaggagatcgagaccatcctggctaacacggtgaaaccccgtctctactaaaaatacaaaaaaattagccaggcgtggtggcagtcgcctgtagtcccagctattcgggaggctgaggcaggagaatggcgtgaacctgggaggcggagcttgcagtgagctgagatcatgccactgcactccagcctggatgacagagtgaaactccgtctcaaaaaaagaaaaaaaaaatcgaacttaactaccaatttgggatttcttaaaagagcttcctcagcattccaaattcactcttgggtggtaacctgtaccctactactttgcattctagcttagtggtacagaaaccctttaaacaattttttttccctactccatggctgaattcttatgccacagcttccctcattttgcaggggaagaaggatctcactgacctaagccccaacttcacctttgctacttctgcttgtcatcacccagataccatagccccctcataacacacagaagcctttccactttactgtctgtcctcactctgcccacttctttaatatgcatgaagggcgggactttatgtgctgggcgagtctgaggggctctgccctaggattccagagaacacccatcaccccactgccaccaccctgagaatataccattgctccctcctttatagttgctgtctttttgtatttcatatccaatagactatattcttttcatatttctgtagactttttatcatcctcaatcattcatccaacaaatattgtctttttgtgctaggctttgtggggaatacaaaaataagagagacttaccttttcttgtctcccacacaaagaccatagcccaaactcttcatgcctctttgaagcatatgtagcagatgtctgtgaagcacctactgtgtgtgccaaggcctgtaacactcattttatgtgtattatctgattggtccctaaaagctggtccatgagccagtacattttatatggtctttttttctggtctgcaacgtattagaaataaatgttgcaaaaagccaaatatacccattttaaaaaactgtttcatgttccaaaattatgtcatttctacttttattaataacataatgcctgtttattatataagagtggcagatttgatctggcatgtttgattttcttttttacattcttagttggtaaaatgaaggcaatcttaatgtgggtttccagtgttagtaagaaccctttgattgcaagtaatacagaacccgacaaactggcacacagaactgaattcaggtagaggaccttcaagcagaattagatcttgaagttcatgatgctcctggagctctggctcctttttgaggatattttctccacttatttgcccatctcttttgtgacaactttaaccccaggctgggttctcactgtagtaaaagagctgcagccaatccaagcctcaaataagtccactacgctgctcagagaaggtgaaagggcttttgttgctgcgcaccaagcaaaagtcacgaggtttacttcagtgacaccagctgggtcccctgtccacgcacaaacaaatcactgtggccatgggaactctgcaggatggaatgtcctcccctgggaagaacatgggagagaggcagacattctttccagttgaagcagggaggtaactgacaacacccacaatagctaacagaaagttggaggtgccagaagccttcgagtgctttacatagatgatctaatttaattcccacagacacaagaagagggagattttattaggaacccatttcccaggggaggacactgaggcttgcggatgaaaggtaacttgtgtaaaatcgtagggttgagaagactagaattgtcagggctcagaaaccaatgctttaaattatggtgctttgacatgctgaggtgaggaaggtctctctgacctcccccattcctgtctctcaatcctccgtctctcccaaagcactgaatgaagttctctgaagttcccctatctgcctaaagcccagacctggcaaagaataaaacaattacctctcgtcccttccctgagttttcaactgacctcatatgcaggaagaaagactgaagtctgtcaacacacctggatggacttttgttacaaaccattgtctgggctggaggcccaaagactctgttccaggccactgtatgttcttcaagttcatttaattcccctaaaaatcacttactacccccttaaaatcatccgtatttccccattactctttccctaggaagtaatgtatataatgtgaacccaaaatacctgagacaggttccagtcaatttagaaagtttgttttgccaaggttaaggacaagcccatgacacagcctcgggaggtcctgatgacacatgcctaaggtggttggggtacagctttgcttttatacattttagggagatgagacatcaatcaatatgtgtaaaatgtacattggtttgctccagtaaggcaggacaactcaaagtggggacttccaggttagaagtagataaaagacaaaaggctgccttctttttttgtttgtttgttttgttttgttttgagacagagtctcactctgtcaccaggctggagtgcagtggtgcgatctcagctcactccaatctccgtctcccaggttcaagcgattcccctgcctcagcatcccaagtagctgggactacaggtgcccgtcaccacacccagctgattttttttgttttgttttgtttttgtattttagtagagacggggttttaccatgttggccaggctggtctcaatctcctgacctcgtgatctgcctgcctcggcctcccaaagtgctgggattacaggagtgagccgcagcgcctggccaaaaggttgcattcttttgagttcttgatcagccttccactaaatacacaatttagcctggcttggtgaatctgcctttttacataaacaatatagcagaggaagcaatcagatatgcattcatctcaggcgagactcagagggatgattttgagttctgtctgtccgttgtccacaaggaatttccctttaggcaaattgtgagggttatctgtagcttcttatctctgtagctatccgatttaggaataaaataggagacagatttgcctggcatagtttccaggttgatttttcccttggattaatgattttggtcccaagatttatttttctttcacaataagcatctgtaccactttggaatattggataatcactctatgatttccttcttatgcatgttaataagtgcatatgcctttgctcctattaacctgccccttgcaggctgattttctgtgatctttcagaaggtgaaggagagttttccactgacccctatagaatccaactgcatctaccccagagctcttgctcttgcctaccatcctgctttctatactgcttctaggctggtgcatctgcagctgttttgtcactagaagaagacagcttgcctaagaacaaaatcaatcaagccaaagccaaaaagcaagagagaagagaaatcaagtcctgaccatttcatctgaactcatagattgaaccatgcatgaagctaaaactacctctacatgaagctaaaaccattcatgaaactaaaccgtgcacacatgaaactatgtataaggcttattacacatgaagctaaaaccatctctggactaaaacatataaggcaataaattttttgtttctgcaagtttaagctttctattatttgcaagagaaaaaacatacagttaagaaatacaaatatttcagaatagcactttagaaattctacaccaaatatattgcaggaaccaatattacatggatcaggatggctaacctatataatgtgatcttttttaacattatctaacatatgctgcaaataaaatattttttaaaaagaacaaaaatattataaacagcataatcaaccagcatgtacaagttatcattgaagcttcattccccgtatcttagggatgcttttatattttggtaaaggatgctcagcagccagatatgtaaggcaatatgattccgtcatgctagtaaatcagagcaaagatcagcattccttgttagaatgtgatgtttctaaagagagatcatctccttgaaagaaccatgcaatgctaatgttcatacagaaatgcaagagcctggacgtgattgctatgacaaaaagactctcacttcaagatgatgtgggatctctcagtggggcaccaggggtgtgtacacacgagaaaatgaaaacaaaatgattcatactaaaaccagtcaatgggatgcagatctattcattttaagctagggtccagaatttctaacagtcctggtcttgctctgaattgtggactaactatgatgtcacagtctctcccctaaactcctcttcctttctaacctgccatctatacccccagggtttccccttactgcagctcccctaagactgatatggacactacaggagagaccaagataggccactggtaaagaaacctcagtcctggtcgcatttggtcctgagtttattgtcctgtggagccgggatgctgaattgatattctgatgtatgggggcagggaaattatgcatgcgggaactatagtaattatgttaattgaggagacctctttgttgtgggatttccagagcaagaagcagcttgtgtcagagatttacagtagaagtcctaaaaataagacccccaggtgtgccccagggggtgaagaaagaggtagctgagaggttaatgtgggaacaaagaaaatgtactggaatcaagcattaacaagctacaacataaggtccaagactgtgaatctcatgaataaggaggagggggttgagggaggggaggcaagaatgcaaaaagctctgcaaaaaagcatcatctctggaaattcatgcgtgaacaaaaacggtccagccagaaactgattttagacggctaagaaaataaaggcagagcagttgctgatcagaaagcaagtcaacacaagtcaaggcagacggcactgagggggtgttggtgaggcctctggtgctgtgtgtccaggcaggggatagacctccagattcgaacagatgctgtgcccagaagaagctggggcgcctagagaatgaagagtgcgctctctccctctctcagtggtacccctcgaatggcccacacgagaaacctaagaaggctctgttaaacctaggaacacagccagctgaggcatttctccagactccttcaggccaagggaagaaactgttctattttattttttctctgccgtgtgttcttttgctacgtaaaatggaggcaaaacagagaggaaatgggactactggtttacccaaattaacctatagctgaaaagacatcttctcctgacccagaaatgaggaatcactttttttttatttccaaaatcaacccttctttctgtataggaacttctccttgtgtctcacaaccgtcaaggtataatctgtttctgaaggtaaaataaacaaatgaacgaaaacactctgtatgaatggaattgccacctccaacttcattcatctctggttttctgcctccttttatggccatgtgtctgcagtgagcaggtcatatccactcccacctttttctcgccatctctttctcctttatcctgaggatcatgactcccaccctcacctctttattgaaactgcttcaagatgcctctgatccccttattaaatgcagtcagtgtctttccgtgggtccatattcttcttcactatcctgtagcaatcaaaagtgttatctgtgatccccagtcctcagaaccaagtttctttggcgtcagcgatccattggggctgtagttctctaactacttagcaactctctaagttattggtaatggctttcacctggcatccacatcagaataccctgggggcttgttataaggcagattgctaggccccagccctacagttttgagtcaacagatctgggtggaccagctcagaaattgcaaatcaaacaaattttcaagtgatgctgttgtatctggtccagggaccactcttcaagcaccactgctcaaatagctgtcagcatagggagtgcattaaagttgtctggggctgagccatattttaaaatatgcctggccccagtacagaccaattaagtgagaatctctgggatggggcctgggctgtccctgtggttctgacatgaagtcagtgttgacagtctgcatttggctccttccttagttccacttggtcatgcaaacttctatggtggccagcgtcagactcagtccctcttatcttcgcccttcaagcttggtattctctccctcccagcaggatattataaggcctgacctaacacagtggctatggaaaaagagacaaggtcagctttaaaaggtatttggaacccggaagtaactctacttagtggccaatcaaataagagcactgaaagagaaaaataattcacttatttagtagtagctacagaaataatatttgcacttttctcaaatactggaaagaccgcaatcaacatccacccaataatcttcacaaatatcatgccaagacctgtgtccaccagctagaaaatagtttattcatctattcagggatcagaaggcataacctccctgttaccttgtcaaaaaaaaaaaaatcttgtctctatttggagacaagattttttttttttcttttcagacagagcctctgtcgcccaggctggagtgcagtggcgcaatctcaaagatcactgcaacctccacttcccaggttcaagtgattctcctgcttcagtctctctagtagctgagattacaggcatgtgccaccacgcccgactaatttttgtatttttagtagggatggggtttcaccatgttggccaggctggtctcgaactcctgacctcaggtgattcaccagcctcggcttcccaaactgctaggattataggcgtgagccaccacgtctggcctggaaacaagattttgtttagttttgtttgtttcacatttttggaggtttcatatcttctttcttttttctcctgataaaccaaacttcagtaagaatcccacatttgccgtttgcattgtggtatcaatttgttctctctccgtgtatattcatgcacaaactgctttttcttttccttttagttcttttactatttttttccctctttgcatccaaagtagtcatttgttccaggcatgttagatggatcaatattaaaacatttatccattacgttgattacaacagcaaattaaataaacaggcagtgaaaaggcatttgatagatttcagcaaacataactattgctgaaataaacagaaatacatagaatgccctaagtatgatgaagactattaccaaagcccgaaattcaaacatcctattaaaatgtgaaatagtaatcaatttcattaaaaccagaaagaaagaaaacagagataccttcaagcatcatttatattcaacatggttttagagagtctagctaatgtaatagtaaaaggaaatgaaatgagtggaattaatttgggaatgaagacagcaaattacctttatttatagattgtatcataaccatatgcctagaacagccaagagaatatagtaataattttttaaaactattggaattaaagagtaaatttcgtttgaaaaatttattaataaatacacagaagtcatctttgtattacctgaagtcatttagaacaaagaggcaattttaaaaattccattaatgatcaatcacattagatagatattaaattgccgaggaatcaacaaaaatgttgtatgggaaaaatcaatgaaaaatataaaataaaatctaaataaatggatgaggaaacaatattgcaaaaatgtcagttcttctcaatataaattaacttttaataaaaatcataaaaggttctttaatgaaaacggttagtatgattttaaatgtcgtattgaaagatcagtgtgtaaggatcgctaagacaatgaagaaaaagagtgagggagagattatacatgaaatggtgcaatcaaaatagtatggtattggcataagaatggtcaaataaatcagtggacaagcgtccagaagtagatccaagtatatgtagaaacttaatatatgataaaggtggtatttaaattcagtcatgagagaatggtttattttataagtgagactggaataattggtcattcatctggaataaagcaatattagtctcttacttcagtccacacacaaaaataaacttcagatgaattaaagatctaatgtaaaaaataaagcattcgagatttgggggagaaaaatataggagaatatttatatagccattgggtagagaagtccttattaagcaagaaaagatccccaaagccataagaaaaaaagcaactaaatgctatttcaaaaattagaaatggataaatggataaaggcactataaataaaattcattcaggggactgtgatagattggtaagaatatttgccaatataatatttgccaatattagcaataagaatatttgccaataagctcaaagagttaatatccctgttgtacaattaattttttcaagatcaaataaaaatagacaaatgggtatggcataatcaacaggaaatttgttcaagggaaaacggaaagggctaacaaacatatgaagagatgctccgtcttgctagtggacagacaaatacaaatgaaaacaaataatatactctcctccacccttggattagacaaaatgtcaggtctagtggcgacaatggcgatgatgatgacgatgatgatgatgatgacaaagatgacacctacactgtgcttaaaggtaccagtcataaaattggcataaaattctaagaatcgtacgtgtaatcattcatttaatcctatcaatagcccatgaagtaggcactattagtaccctcattttgtaggtgaggaaatttatatacacatatgaaataaaattttcggaaaacaatacttatccttaccacatgcaaagttctctgatatttactattcttttctatgctgcctcacttaaaaattactggttgggtaaattgattttatgatacacaaaggggtaaacccgcaagttgaaaatgcctgacctacagaaatgttcacagattactaaaacaatgagtttctgagtaaagtgcacactttaatctcatttatagaagaagaaaagaaagaaaggagaaagaaatgaagagggatgcatcatatatgtatgtcctttctagagatgtgtatgtgtgcttacaagtgcagaaaaaggtgtggaaagagccacatctattgatattgactacctggagagattgggggtaatgagacgtcttttgcttgtatatctccgttttgtttgtcatgctgcagaaagaatgctctgcttttagagtttttgaggacaattcaacaaactagaacaaaagaattttgtcatctgtaaacttctgtgctctgggattaaaacctaagctttcctaactttgttgcatctcatgcttaaatggccctcattcaacatttggctcccatttattaaaaaaataaatctttcaattctatctacaaaacccactgggagagggataaacctgattatgaggtcttcttatcgaaggagaagggtaaatgattgttctcacctacagtaataatgcaattgaatgaagggacaggaactccgtggaaaatgtctaaaaagaatcacaaaaaatgtttacagcagagaggtataattccattgaatgaagtttctttcattcattcattcaaatgcacctgattttgatttattttacctgtttgacataccaaaactgctctttacattttccaagtaattgatagaggtttcccctacctacaaaccagaggttttagtgtcccctttaggccttcctccaattgagttgttcaagattcctgggggcttattcagttcaaacatcaaataaggctgatttcttcttacaaaggctaagaggaaaaacataagttgaattttcagtcaacctctgtggttgttggtgctgtttgccagctccatcttctgggcacaggctaggattgcacaaccctgcccacaacagggttagatgcaggtacaggactcactttgtccaatgaaatgagagcagaattgaggcgtcatttaaaatccattgcataaatgtgttacatcattttctgcctcagcaatggtagaagcaggcgtcaagaacatctctcagcctggaccttccatatctatgatggcattcagaataattttggaataaccttatgttgtattaagccactaaaacttgtgtattgcttgttactacagcataagctaaacctatcctgactgataacactccgtgagcacttagggcttagttggaaacagctggtttacataactgttcagactggaccttacaactgaaagaatatttatacactgttgcattgaggtctttgctgtctggaaacctggcagaattcaagtggcgcacttaatgggattcagtactatgtatttttagctacactcaaattcttaatcattgtcctctgaaccacattatctttgcctgggtggctgagtacagagtaacttctaggctcagccataggctacattagaaattctcagtgaccttaataccaatgttgtacccaggtcaccagaccaactatgcatctcatggtgagtttctctttgggatccctgggtccttatctgaccgagagtcttgctcagtgccaccttgggccacttcattatgtttaactaatttcaaatatttggataaggattttagatgttgatctcttgtccccagaaaacctcaagttccacatgcaattggtgactctcttccgagggttcctactaaagaatctcagggaggagcagccttcatcaatccacaaaaggtttggttacatcgtatgttgggctagagccagctcacagagtgtacaagctcctgagaaccgattgtgattggtggtgtgcagcttttcccaactctgccttcggtgactcagattacattcttttgttttgtttttgagacagagtctcactctatcacccaggagtgcaatagtacaatcatagctcactgcagccttgaacgtcttggctcaagcaattctcttacctcagcctctcgactagttgggactacaggtacacaccaccacgcttagctaattttttttatttcttgtaaaaaattaaaactatgttgcccatgctggtctcaattcctgggctcaacaaatcctctcttctcagcctcccaaagtgctgggattgcgggcctgagccacctcatccaacctaggcggttttgaccacagtgggagtatttgcaccacaagaataggcaattgctacaaatcagagttgttttttgtccttggagaatcccttgttgaacacttaccagcacaccactgaatacatccagcctcctcatctataggtgcctgctgccttacaacttcttaattgagagggctcactgacatgactcttcctgcaataaggaaaattattccattttttcttgctattggcctctataacttagtagtcactggcttactgttttcaatttcacctcacttgataccctattataaagaaactgtttagacaccattatgttccaggtactaagaagacaataatgagcaaaacagagattctgcctactccattagagattcattttagaagtctggaagagcaatggcacctactactaatgtaagatacttttaatatcatatcccttatttgtcatttttgtttaatttcctcagagttaataaataaatttgtgtgattatttcaaagatagcagttatagtagccctctgttacatttgtgtggtccataacactttcttttaggaaccaccagccccacaccatgtaattctagtagaactatcagttggggccagtttccactgtcccagtggtaggcatatagctgaggataacagcaaatcctactccccaggatacagagactgctccaagatgggcacgtggcccaaccatggccaagcagaatccttttgcagagatttatatggattctggaagtctgaaagatttccaatctgacagcataaaatctaagaaccttataagcctggaggagccctatcacatggagatcatttggaagagaataaagccaaagcagatgaaagcagacccaagaaatggggagggaggcagagagggaacatgatgatatggtttatttaagtcccaaatctatccatgactgaaaccaaactaactcacacagttttcaattatgtgagccaatcaattccttttggcttagagcaggggtgtccgatcttttggcttccctgggccacattggaagaaggatggtcttgggccacacataaaatacactaacactaatgataactgatgagcaaaaaaaaaaaaaaaaaaaaaaatatatatatatatatatatatatattgcaaaaaatctcataaagttttaagacagttcacaaatttgtgttgggctgcattcatgtggcctgcaggctatggattggacaagcttggcttggactaatgtgcatttctatcaggtacaatgttagagtcctcattaatacagcaatgtaagggagaacttaggaaacagcattctatccatgataagagttaaagagaggtagccaggtagaagacctgagggtgggtgtgagcaaaatctaggagaccaaatcacaggggcctgtaggagcaaagaagactctagaggatcaatgtaggagctcttgttcttgtgcaatccctttctttgccatgtaatgtcagtgcagaggtatccaaaatctggagacttgagagagagagagagaaagaaagcgaatatagctatagagaaaacactcattccaggatgaagaaaaacaggagagaggtgagatgatgctccaaaggcaaggcgactgctaaaatcttcacaagtcttttattgtctttctactttcttcttggtgatcctcagtggatgcagggagggcaacccaactactgtaagtcaaccggacctttccctgccacatagcctctgcttccctctcttttccctcttctcagccatgactttggatatcttttcaagtttggggaaacttacaagtatgtacctgagttgcttgccaatggttttttggcttaagaattgtttattttcctcattaatttctagcatttcagtgggcaactcttatttacttattcaacctggggaagaacatagattttagtaaagggatttggtgaacattgatggagttaagcaatggtggggttggactgtaactgcaggtttgaggagtgacaaggggttgagaataatggggatatcagtgatgtttgggtagaaaggggagacaagaaatcaatagaagggggacaaatgctttaaaattacattctactcatttgaataaaggcccagcttcctctaatttgaacaataaggagggctgaggactgagagaccgaatccctggactctatgacatcactatcctccattctggagtagccagtctgagattatatgctccgtaggtccaaaggcatccaaaaatccatgaggcaggtggtagggttgatcagccatagagaatgtgtactaccccatgatatatctgctgaaatatggacaaaatttggatgttatccttctaatttagggtggcaaaaaaaataaaaccacaaattacatcctatgaaaaatacacgatggagatatcccagatcctttgagattcatgaaaataatctcacttccaagagaaatttaccatctgtactagaagtggctgtatttccatgatgtctgtaagaagggatgtggggcaggctgcagtgataggaattgtcctttggaaggaagggctctggaacaggaccaactatttggatcatgtgtgcacagaaatatcaaagtatcaaagcctgtatgtcattctaggaaattatataaggaaaagtcaatataaatcagatagatcatttgcttatccactcattcaagtactcaatatattcttcagggacagtgcagagcactggagatatacatattcaaatacatacatacatacatatacgcacacatatgtatgtgtgcatatatatacatatgtatatatgtatagtgtgtgtgtgtgtgtgtgtatgtatatatatatatatttagagagagagagagagagatttctgcctttcaggctctaatgagagagataatatcataatagcataaagtaaatacgtcttattaacaaagttacacccaaatgctaaggaagtgtggtgagggaaggaaaagttgaacatctggattcacagatctggtgagaaacaggggtaaatgccagttacctgaatttagtgtgatggaacaaggactcatcttggacccaggaaaacttacagtgttacagtcccatctgttactgactaattgcatgatgttgcagaaactggcctcagtttcctcactggaaaattgaggtatgtcttgtagatttctatggctttcgtatttgtgtgtgcatgtgaattttaactagcaatgcgtctgctaagcagaaaatctttgcacccagaatagcactgaaagactgctgagagaatgaaacacatccaggctctctttatcttattgtccgtgtttccaaatacatcgcaatttccctgtcttgtctaattaagctgattttaaacagattgtgatttagaaaaagaaaagaaagctaagtatttctagcagtgtcaaaccatttattttgattaaaagacagtctttatatccaaacaagcctgtcttatttgaacccaaatgaagaaaaagatcttcatcctaagtaatgggtggtcagtatttttaataatcctttataaaatctaagtggaaaggatgtcttagaaacacacaaagagacttagaaatgggcctattttctgtgttaaaacaaaaccaaaactagccacctgggaaacaacactcactaccctacacaccttctggctattatcttctttctttccctggagactcaagcactgtgatgtctccatttttctcacctccttattgtagttcagcccacctgcagccagactgcacctcaactactcatccaaacccgtgtcttcccaggtcaacagtcaccttgtggccaaaaccagtagaggctccttgtcctcattctatagaagttccctgccttgacactgtcctctcttccttgggcttctgggacattaatccctccaggccttactgcttcaaaaacatgacataactgtttatcatgtcaagaactctgctaagaattttacatatgtccttatttcaacataacaatatctgtataaagggtatgttatatgcaattttacggaagacaaaacaggcttggagaaccttgtccaaagtcacaaggcaggaatgtggctgtgctggttttcccaaggagaccctcttagcactataatcatgataataaaaagcatcagccccgacttaccttattggctgattattttctctattctgaatctttccattttacatgaaacgttttcatttaagcagggcatagaaatcctgcaaatgcttccctcgtgtcaggtaacataccagcttttcatagacttttcctcagcaaaacaagcctcagacagttgctattatccctattttacatttaaggaaacaatggttgaaagagattgccccaaatcacagagctcgctctttgtcggccttcatagccccctccatcccatcagccccctcttccccctccttcctgcactctagctaggaagacctcaaccatacacatggttttaaccctacactgtcgacctcaaccctgcatttcagcctcttctaggtgcaaaaccagttatccatcatattccaaggtcatctcaaccaaaagaaaaacacataaaaagggccaggcacggtggctcacgcctgtaatcccagcagtttgggaggccgaggtgggcagatcacaaggtcaggagttcgagaccagcctgaccaatatggtgaaaccttgtctctactaaaaatacaaaaattagccaggcgtggtggtgcgcacctgtagtcccagctactcgggaggctgaggcaggaaaaatctcttgaacccgggagagggaggctgcagtgagtcaagatcatgccactgcactccagcctgggcgacagagtgagactccatctctcaaaaaaaaaaaaaaaaagaaagaaagaaagaaagaaaaatacataaaaagaaaagatcacagacatagtcatctttcctccaaaacttaaatgtcttctccctccacttctcctaatgaaccacaccaccactttcaccacgacatcagaaatgggcaaagcattcttaccccatcccacctccctcattctccgcatcaaggtagtccccaatttctgttagctccatcacaccacgaagtgagcccacctgactcacattgccccccattttcatgcacactcatcttttcttgcaaggatcccttaaattacctcctgattggcctctctgtctccaacatcacacaccttcaacagttaaatccacaatgctgcaaagcaatctttctaaatctgaagtgctaccctgctgcttaaactctgaagtgacatgcctcgttgctttcccaatctccacctcatccattccccactggagcagctatgggtttatgcggggtcgaccactcctcttgatcatgatggacaagattccagacctgagaccatcaacatatggaattccctatccatgatttagagttagcatggaacccagttggtctaatcaggatgacaaggtgatctcaggatgtttgttggatcattaagagaaaaacttaaaccttctcttatctccaaacataaatgaaaagtaagtgttggtgccatcttgtaacaaccaggccagtcaatcttttaaacctgacgtttcagaagattctaaagttctgagctattaaaataaaagtcattcaggaaaaccagtgtgtatgtcaggccttttgagatgtgtcttttcatcttgagtacttcctctgtgtatacaaataccattgttgaaaactctgtgaagataataattgcatttttctcatattacattagcttgtttcatatgaaactgcagtttttgtggatcaaaatggtggaatcttggcatttcatatggttcaacctgataaatgtccatctctctgtttatcttctaagttccttaaaatcaagaaacaccttggtggtactggagcctagcagtgtgtttttctattagtagtttgataaatgtttgtctaattgaattgaacagagacattcaatataatactctgcttctgagataaggctctacactttccacctaaattttgaggcttcctgctctgcctccttccttggctgttccttgtccacaacctgtaagtgtaagaattctcagggtccttttatcttttcacttaaggcagttttctgatggtctcatggactcccattaatttgttcatccccccacccccaacaaacaaacacacaggcacattccccacacatatgtcttcagttccaactcctctcccaaactcgaagctgaattttccaattacttacaggacatccatatgtagatgtgtaggtatcatctctctgcagacgtcacaaaataaaactcatgatgtacctatttcctatacacagacgtttcctacctatctgatctcctttcacaccccatcttagttaacagcactccatcttcccagtggcacaagctcaaaatcttgtcattatcccacacttaatcactgttcactgtcaaattctgcctccacatcccttctgtttctaagtccctcttccgtctccccttcgttacacacattgccaatgtcccagttcactgacaacactcacatcccccatcagcatatcctctatcccatggcaagagcaaactttctaatatatctatattttaccatacaccgtctcttctcaaatatacttactgttttctcatggatgcaatgcaaacatgcaaggtaaacattgagggaagactgctcaacatataagagagatcaaaatgaggagaagttactcagggtagattgcctgcaagaggtgagctttgagccagatttcataggagaaaagaaatgagaacaatcttaactaaaccaagggaaagcagagatgctgagaatagaatccttggggattcctttcaatgcttcagaaattacttcatttaaatcagaaagtggcatttgtcagactttccatgtaagatgactggcattatagcaattatttttcagagtctaaatatctccactgaaagttagagaaacaaagcagaaaaaaatactgtaagagttttgttgttagcatttttttattctgggacaatactcttgcattggtgattcaaaggaaaatagaaacgtggacagttttactactaaagaaacaggcccaatatttaaggcttgaatcgaaaagttatttttgaatattgcaaacatagaacgtattcgagtatgtgttccgagtattgcaaacttagaacatatttgagtattcgttccaggaacacattctgatattctgccaagcagaatcagaactccccaagatcaaggtgcctaagagctacttcaaatgtttcataagtagttgaggcgcacatcaatcaactgacaaaaatccttagacttatttattttgtttcaatttctatatcttcatgaggcagaagaggacaatctggttttgaaaatcttcataccgaaacaatgtaatacccacatcagcccaatcttacatcaacttccaaagtaattagtacatagaatatcaactaggatattctttttactagcactcttgggaatatcaaaatagaacacgtttattgtcagagttatattaacacatttaacccttaagacatttaagcaaaagtcttatgccttcccacaagctaccaaattcccagtcttcttaaagagctggtggcacttgacctttagacactacagcagacaagggatcaggaatacccacattctgctcaccctcctcatcatgcagttctcacagggaagctattcttaagaaagagtaactaaatgaaaatatcaataatgttaattattcatctagcccagttcattattattcatctagcctcaatcaagcccacctggtaagagttgcactggtcacatgctcaggaagcctcaagaactagggggatttccggtctcctgctgaatcccctctccttggggagagaaaacaagagagagaggtgctgcatcaccttccaggttgtgtttgttctgggaacgcaggatggaattctgcctgcctcccaaagcccctgaatccctggttctcctcacccacacagcttatagacccagctgtgggagaagaaacatcactattaggttggtgcaaaggtaattgcacaaaaaccgcaaacacgtggatggggacagtgccagaagataaccctcacggcgacaaccttaatgaggtttcactctgagcactagcaagtatgtgtatacaaataccattgctaaaaactctgtgaaaataataattgcatttttctcatattacattaggttgtttcatatgaaaccagtttttgtggatcaaaatggtggaatcttggcatttcgtatggtacaacctgataaatgtccatctctccatttatcttacaataagttccttaaagtcaagaaacacttcggtggtaccggagactagcagtgtgtttttctattagcagtttgataaatatttgtctaattgaattgaatggagacattcaatataatactctgcttcgaagataaggctctacactttccacctaaatgttgaggcttcctgctctgcctccttccttggctattccttgtccgcaatctgtaagtgtaagaattctcagggtccttttatcttaacaagtatgtctccatgagtgcctcggattctgaccgatcagatgatcattccctttcctgggatgggttggggcaaccagggcgcagctgagggcagtgtgataggaacgaatgtgcccacggcatccttttgcccaccattccgtgggatcggtcactataagtatccaaccacctaggggcgcttgcctgttggcatttaccctgtgtccctcactcatctgaccctggggctgccttcctgtagcaatgctctatttcccatcaggtggagagagctggtttctgcatacttccatctccatcttctgctgcagcagaacccagctcagtatcttcaaggcacagagaaggccacctcttctagcccctggtcaccacttaaagtggcactgcccatcttgggaagcctttgctggggatgcctctttttatgacgcctctcataagaggggaggggcttcctatggcacctctggaagaggggaaaggctgaggatttgggatttttaaaaatttttaattgtaaaagttcatgcttcttgaaagtagaatcagacaagagggaaatgtgtaaaataaaatgtgaaaatctccttacctagccgtctcctcttcacacaaaaacactgttaaatgtctcgtgcgctttcttccagacctttctctaaacagaggaagggtcgtgagggcagaaggggaggagggattgttgctcttgttcacaaacctactattctctaactattgtttacagatatatccccatgtcagtgcatagagatttttcttgatgaaagtatatatatatgcatatttgaattacaatatacttgaattatatatatttggattatatttatatatgtgtgtgagcataaaaatctatatatagatagagatatagatagatagatagatagatatagatagatagatagattttaaatcattatagccctaaagccctaaaaaactttctggtatatgaatatcataatagcagacattttgaaaaattctttgcagacataaacaatggaaaggtataaaaattaatggagaaatccaaagagcccggttttttcaatacaacaaatataaccataaaaatgatctggccaggtgtgttggctcatgcctgtaatcccagcactttgggaagctgaagtggctcgatcacctgaggtcaggagttcaagaccagcctggccaacatggcaaaacgccatctctactaaaaatacaaaaattagcagggtgtcatggcaagcacctgtaatcccagctactcaggaggctgaggcaggagaatcgcttgaacctggcaggcagaggttgcagtgagccgagattgcaccactgcactctagcctgggaaacacagtgagattctgtctcaattgaaaaaaaaaaaaaaaaaaaaagatctccaggcagtatgaaatatttcgcttacaaaatacattttttaaatctgtggctgtcagaatgcttctcttccccttcttctctcaccgtaaaccaagagtccagcactaacagtcagacttttgccaccaagacaaatgcagagaaggggtccccagaagggaggtttgctaaggttgagggaagggtcacccagtgagatgcccacagtagcctgaggtccttttagacctccacaacagacatggagatatttagggagttgtttagggttgaagggggaagatagacaatgctgcccaggaatgaattaaagactcctacctccagaaaggaggtatccttattatgacaattagctgtcaatactttgctccgcacccacacccctcaagggaatcctgccttttagcaagactgacccaagtacagagctggccatccagtagcctattatcaagtaaccttccatctaagtagcctattattagcaaggaaacatggccaaatggaattttttttttttttttttttttggagacagagtctttctccgtcacccaggctggagtgcagtggcacaatctcagctcaccgctacctccacctcccaagcttaagcgattttcatgccccagcctccaaatagctaggattacaggtatgcaccaccatgcctggctaattttttctatttttagtagagacagggtttcaccatgttaggcaggctggtctcgaactcctggcctcaagttgatccacctgcctcagcctcccaatgtgctgggatcacaggtgagagccaccgcacctggccccaagtggaaattaaaacagcactgtattagcagtgaagccaggctcaataatctcccaggctgctgtcccacccattgcccctctgcaggcactcacctttccaagtcactttgatggcttctttctgcgagtttctacaaccttcagatccagctttctccagccacaggagtgtcctcaacctgtgcacagggcgggctagaaggaccagggggtgaccccctacagaagcagcctgcaaccaatcatgaatgagcattagtgccagatgcttcagctttgcatccatcaggcatgaggtgcatctacatgccctggcagaagtcccgatgggagggagcaccagtgctctctgacatagcctgctgtgggcacacctgaattggctttctcccctttcctgcccattctcacttcctccacccctcctggtgcttcccagatccccctccaaaatgaaccccttgcacttgaatccttatctcctcatggggggacaaacttaagacaccaggccttgaagtctttcctcctatttgcttttcatccttttgcaaatttatacaggtcagagaagcaagtattcatccagggaagcttatcattttcggaagtgtttagaaatgataaaaaatgaatcaaaataaataggagtaaattttattttttaaaaagcacctaatgataaatatgatccatttaatcttaggagacaaattaataacaaaacttttctttataattaagtgatgaggccttcaacggacacactatcaagaagctcaggatgtcctttttgaggcctcctcctgctctccaaactcttcatgattgtgcaaaaacgccgagcagagagagaaatggaaattgtgaccagtctcctaagacgtcccaggttgggtttgctattggtctcattagtgccactgaaactaggtttttaaatcttgtctgccttgatggaagcatccatgcccttggtgactcagttcccagcatcgacttcaggctcagctttgggacccatgtacccaaccatgaggggccactcaggtgttgcgggaagagtcacaagcatcatccaagaagactgtctgcagttgcccaggccaaggtgaaactggaagcatcttttgataaatatacaatgtaccatctcactcagtccctgctagataggccaacgaatgctttgaaaaactcctggaaggataaacatcaaaatgtttatgttgttgtgtctgcattgtgaaattggggttaatttttattttttctttctgtttctatattttctgaatatcttctgtgaaaatgtattacttttgccaccatattttttcaatgctatcaattttttttaaagaaattgccactggtgttcactcagtcatttaacaaatatgtgccaggcatatcctaggcactaagaatgcataaatgaacacataaaacacctcctttcatgggtgttacacactagtgagggaaacagatgttacataagtcagcaaatatgtacagaatataaagtcaggtctcggtgaatgttggaggaacagcaaagcaggacgagccataggtgacccaggtagatcatgtgcaaatggaacctatctcagttcaagctgctattacaaagtaaaacagatgggtggattataaacagtagaaacttatatctcacaattctgggggctggaagtctaaggtcagtctaaggtacaggcatggtcaggttccatgagggttctctccctagtttccagatggctgacttcttatatcctcacttggtggaaagagggcgagagagggatctctccaggatctcttttatgagggcactaatcccgtttatgagggctccactgtcatgacctaatcacctcccaaaggccccacatcacaataccattatattgagggttaggatttcaacatatgagtttgcgtgggagcaggaggaagagtatacattcagtccataaatgagaaaccatccagaaattatccattacaaaggagttactgtatccttcattttttgcatgaaaattatacaaactgttggaaaacaattcatctttatcttgcatttcagattaaaattgtactatttaccttctatataaaatgatctaaaacaagatcaatttatctgttagaagtaactttaaaagtttttttaaactaaattcaggttttatatgtgtcatctttcccagttctgttgatttttccctctttactcactctctggacttctacttttcaaaaccacctacaaatgcccctccactgtatagcaacaggctccacaatcagtgcaaaatgccatgatcaccgtgacttgcccagccacccaccttcattcttcacagcctaagagtcaaggaagtgatgagtcacccttcatcatgaatgcctcggctaggtaggcccgcacaggcttcagtgtttaggacccagagttatccctttacagcatgttgaggaagagttgctgaagttcatctgccttttgcagcctgcacaccactgttgaatgttatttcatgaaagaaggatacccaaaactcaccaagccataagaattcacaaccgcatttacccccatcctttggaaacggcgggatcaattattttctttctaagtcctcttggccatttccaaatgaatgtagggtgtcccaggggttcccttgtgggcccattcagtgtggccaagagccccacagtccgcacgtacacaacagttctcagtgatgctgcagagcaggacaaagaaggacagagctaggtaagaagccaaagagaaaaggctgccaactggagaggctcttaaagagacaccataggagattttaaaaattactgtatataaaagagttcaggtggtggaactggaatagttgctataaaacagttgttctaaaactctcaaagaaaacactgctagaatttaacagaaagcttctgcgttctgcagttgaaaactctaactgtggcacgggtgaaatcactctcatttggcctggagaagtgggtgtggaaaatggcaccccgaggcaatcaaagagacagacttgtgtttcctctgctgagtcaaagaaaagctgagcactgaggatggccaggcttcacatagccaaagcccagagccaggaggataaaagacttttgagcaaacacatgccaccaagtccatgcactgaatctggacccatttattcttgagtgccctacttatttttttaattcttaataagattgattatctggtgttttgacccatatagtagattacaagaggcgaataagaaaatgggtcgggggtcgggcacgggggctcacacctgtaatcccagggctctgggaggctgaggtgggtggatcacgaggtcaggagttcaagaccagcctgaccaacatggtgaaaccccatctctactaaaaatacaaaaaattagccaggcatggtggtgcatgcctgtaatcccaggtactcgggaggctgaggcaagagaattgcttgaacctgggaggcagaggttgcagtgagccgagattgcaccattgcactccagcccaggcaacaagagtgaaactccgtctcaaaaaaaaaaaaaaaaggaaagaaagaaaatgggtcagggatgctgttgggtcagaagcaggaacactgatttttaaaaagactacacgtacaataaaagtgacaggtatgtgtaagagaaaagattaacaattttacaacagccaacaagaacctcccaagcaaaacagagcaagttttttgttttttgttttttgggtttttttttttgaggcggagtctcgctctgtcgcccaggctggagtgcaatggcgctatctcggctcactgcaagctctgcctcccgggttcacgccattctcctgcctcagcctcccgagtagctgggactacaggcgcccgccaccatgcccagctaattttgtgtgtgtgtgtgtgtgtgtgtgtgtgtgtgtgtatttttagtagagacggggtttcaccgtgttagccaggatggtcttgatctcctgacctcgtaatccacccgcctcagcctcccaaagtgctgggattacaggcgtgagacaccgtgcccggccaaaacagtgcaagtttactagaagcaaaatagcctaattccttcacccacttctaagataccacagaaaccgatattcataatgaaggcttcggagagtcaatagtaaaggcacttgcattgggtattctcagggaatgaagtggtgggggtgtgttttagacaaattcccatcaaaaatggtcaagtggagagagttaactccaaagggccacaaaggaattttggggttgatggagatgatttatataatgattgggaagtggttgcacagatgtatatatttgtcaattctccaaactctatactaatggaggtgtgtcttattgcatgccaattacttcaatgaaattgatttaaaagtaaaaataaggttcaagttaaaatttggcacttacaaggcagaagtcagctagctgagactccactaatacacacaatggcctagttccttggtgataaggccgttagattaattcaggagcacacattatgcctgcactgtgctgagtcctgagaatacgaacatcttggaaatagcatctctctcttggaaaggcccatagtttgatgaatttagtggctaaaagatgcactaattttcttaaaacctcaacacacattagaatggggtgttgaaaaagttagggtccagagagcccctctgacatgggtatattgttccttgcctcttctctcaggttttgctgacctacacaattttctgcatttggaataaagcccactttttccagcatcattttaaagaggaaccattaccaccctcgactgagaacaatcccaagggagttggcagagtggattttcctcttgatttctgagcaataaacgggacttgacacaagctgtcagaatctagtagctctaaaactacctactgggtgagggaggagacacagcactgaaacattaggctgcaatccccctgacccaggacaaagggtcccaacactcagtcatctgggactgtctgaaaacctatcaaaggttactaatataaaaatagaaacagattagatggctgaagagtgtcttagccataaccaggcttgcagcaaggttttatacatatttgttgaaagaatgagtaaaataccaagcttttgttcttatgactgctttataatacagtggggctgtaaggctaagactggcaaaaaggaagaggtgaagcaattcaatccctaaatttagctgagtgctgttacacctgcaccttgcgcttcctctctgcccaatccccacccctcagcctaatccccgccccctcagcctaatctccccaccctcagcctaatccccaccctcaccccattcccctcccgctcagcctaatccccacccctcagcttaatccccaccccctctgcccaacctagtacccctcagcctaatccccaccccctcagcctaatcccacctcctcaacctcatcctgattccaaaaggtttacaggctcaatcagaggatgcctggaagtttttgtgtgtcttgggagctgtagccccaagtgtaaccccttcccagtgcttcccttggcctgttatgtactggcagcatgtcagtcatcaccccagaaggaaacagcatctaactcagattgtaattctcttaaggggagggatgacacacagaactgtgggcacatttaagggaaacagtgaaggatggtgaggcgcccagagactagcaacatgggaggccattgcaatcccctggcctagggtcaccagatgcaaataaaaatgcagaacaccagttaaatttgaatttcagataaacagcaaataattttttagtacaagtatgtcccaaatattgcacttatatttacttatactaaaaatattactagttgcttaactgaaatttaaatttaactggatgtcctatattttatcgggtagccatacccaggcctgaggcaacttggtgttactggagcccagtgagagttggagccgaggaggatgtcagggaggcccagcaggaacggtgttcactgaggtgtacagaccagaaacagagcccactgcagcaaagagcaaggagaaagatggtacctctctctcctcttgccctctaatctcctaagggcatttcccaatggcagaaggcaattggaaaccagtctacgagacagcctcacggctataacccttaggggttggtctcctggagcaaagaggccagcagagaaggcagaaaatggatatggaggttgaggcaaacagactaaccagcttagaaatgttctatattccttctaggagcatatggaaattatttttatttttgcttaataccaccaataaagctgaattcatagaaagcaaatatttggggtgtctccaattgcacagtaacaatagagcttgaattttatatggatatatttactcacacacaggaagacaccgctttctaaacatgtacatgttcggttcacaggaagctggggaaactgtgaaccggaaataggcaaagatgacactgcaaagtgcctcttggacagttaaaaacttattctgcacctgggaactatctcaagacagagacaagtaattccatcggtcatatttttgctggcagtttaaaagcaaacactgggccaggtttgacttgctattggagttgaaagaattaagcatctttggaacctcctacttttggcccgagcgcggtggctcacacctgtaatcccagcactttgggaggccgaggcaggcagatcacgaggtcaggagatcgagaccattctggctaccatggtgaaaccccgtctatactaaaaatacaaaaaaattagccgggcatggtggcgggcgcctgtagtcccagctacatgggaggctgaggcaggagaatggcgtgaacccgggaggcagagctcgcaatgagccgagattgcgccactgcactccagcctgggtgacagagccagactcggtctccaaaaaataaaaaaaaagtataattaaatttctttatcacttctaacttctttgccccctccaaaatcaagttaaacatcaaagacagtgcaaaggagggggaggggataacaatgaagtcctatacagaccctttagcttaaggaaggaggtggggcgggacgttgggaagcatgcagaaaggtctgagaaggaccaggctcctagttctagctggttctgcctcctaattgcccccagctccttgtgcaagtcacttaacctcttcaggcctgttttatttttttgtttttgtttgtttgtttttatctctgtactaagggaattagttttgagccatgtagctttttcctgatttaagagtctctgggtcccgtatgtgctttggaaattcaattctcaataatcccacaggacaagagtaaatagaaatcttagccgactatactaacaaaggtgtcttcactacctaggattaacctagagactggccaagcccactggagtttagcttccattcagctgattttaccgtccagcttcaagaggagccatcactgtagcaggaggggagtgggaaggaaatccttcccgaatgcttaggacaggataaagaggaaagttttctcactcctcacataaagtcaaaaggtttttagttcaccaaaggcacaacagcctcaatgcccacaggatccagccaatggttaaagaaagacataggaggccgggcttggtggctcatgcctgtaatccctgcactttgggaggctgaggtgggcggatcacaaggtcaggagttcgagaccagcctggccaatatggtgaaaccccgtctctactaaaaatacaaaaattagccaggagtggtggcggctgcctgaaatccctgctacttggtaggctgaggcaggagaattgcttgaacccgggaggcggaggttgcagtgagccaagatcacgccactgcactccagcctgggtgacagagaaagactctgtctcaaaaagaaaaaaaaaaaaaaaaaacacagagaatgaaatggggaaaaaaaatctgcaatacacaggcagtccttatgaaaccctgtattcttaactttaacttatttgtttattaatgtatcttttcacctcctgactgtgcccattagcttttagtccttcatgttccatgatcgcaagttcaaagcaagacatccatgaccatctgcccaatactttatctatacccgctccaggagccgcggaaaaaagttagatccccttagaagtttgagagagcacccttctacttcacacagctaaaaggagcaaaaagaaaacgcatgcctctctcagttgtcctgcatctgagctgcatcatttcaatggaggtagaaatctgatgcttgtttttccaccctggctgaagaggtctaagcaccgaggctgttcatctgggtctcaaagtgcacagcctaggaaaatcctgggaagatactcaggagcttacccagatcatggggtgcagagaaagcagcctcatgctaagtcctccttaggaaagagggaacaacagtggattcttatgcatgaatcagcgttccgatgatctcgcaggaagaccacaatcaaagagaaaattctaaattataatgagccatgtgtgtctcagtgcgacagtcatgttctcccagactttgaagtttgtaaggaatttgagaatccaactggaggttccgcggggccacagtgagggccccaggggactgcacgaatgggggccctgcaggcatgtgtccttggttcccatctataaaatcgccagatttaaacagacagctgctgttcaagctcttaaaatgctgtgttgagggaaacgcagggctgcctcgagcctgctcgcccagcagtcagtctgatgagaaatacagttgaaagaacaagctggaaagccaaatacctgtcaggctctttcacactgcagcattgccagaaggtctataaaaatgtcattgtctctcagctgccggtgattatattaccctttacattggctgttggtaataaaaaaaaaaaggcaaatatcatttttgcactgctctggccttcctctggcctttttcaaacaataatagactaaatataaagagacagaagtcattactggactctttaactagtgccaaggaaaatgaataattaaggaaacattacttgaaagaaatttacacggttgcttttaagttagaactaaataagagctctttaaaaatacatcatttcccctttatcttaacacagcatatgtactctggcctaatatattatggtggctactgtttagatcttaccaggaaagaaaaatgcttttagattccattatcctattataagtcccaaatcaaacagagacacagggaagagatgaggaggctggggaggtagaggctggtctgtttgcacagcttccttcacgtctggcctaccaaccaatatttaattttgttcacctaggacagcaattctcagacagttctctgaccccccgaacccccctttaacatccatctcaatttcaggaagcctagcaatttttaaataatgtgctcaattttgttctctgaagttgtcaagaagaggtaagcacagataacccctatctatgcctcagcatctgacttggtgtgtgcaaggctggttcttgtggagcaatagctcctttcctagccctcctcactttctggctctccctccctttccccatcttgcttctttcccctcatttgagtctttagcctgccttacacaaggagaattaaacagagctggcaccagacccaataggacactctgtgcaccaggcgacaaccttgaccagttggagcgaccataggaagattgtttagcaggaagtccagggcttggagccacttttctcagcctggtgccatgagagcaggttgtcctggggcctcaagcatggccagtccacctctgcagtgccagatccagagacaacctgaagtctggcagagtccaggtgtgtggctactcggtaatgtgaggctgcaataggagaggcaacctgagttcctgatgttgtcttagtgcacattatgtttcaggcctgaagcattgggccttgggaattatctgatcacttgttcagatagatgttctgtgtcctctcttctcaaatgccctgactctccatacctaggtgcttcacgtgccatagccccactcctttcctctctgttacaggctgacttgcatccccccaaaatttatataatgaaatcccaacccacttccttagaatgtagttgtatttggagagaaggtcttaaaagaggtgattaagtgaggctgttgtagtgaggccctgatccaatatgactggtgtccttaggggaacagacgctagggctcaacggtgtgaggagagagcaagagggtggccattcccaagccaaggagagaggctcatagtctcaggagaaaccaaatatgtccacatcttgatcttgcactttgccagaactatgagagaataaatttctgtcgtttcagccactgagtctatggtattttgttatggcctaacaaaacgaatccactctacaaaggtcaatattttgccccttcctgaaaaatttattgtattattagggatgttataagctacaacctgggcaacttagaacgacagaaatttaatgcctcacagttctggaggctgaaggttcaagatcaaggtgtcagcaaggttggttccttctgaggccatgagggggaagctgccccacgcctctctcccagctcccggtggttcactagtgatttgggtgccccttagattgtatgcacaacccccaagcctccacctctgtcttcacgtggtgttcttcttgtgtacttgtctgtctctgtgtccaaatttcacctttcatcagaacacctgtcatattgaattaggtcccaccctaatgacctcatctttctttttatggaggtataattgacaaacaaaaaatgtatatttacagtgcacaacacaattttttctggtttggttgttttttgttgttgttgttttgttttgttttctttttgagacagagtttccctcttattgcccaggctggagtgcatggtgtgatcttggctcacggcaacctccacctcccaggttcaagcaattctcctgcgtcagcctcccaagtagctgggattacagccatgtaccaccatgcccagctaattttgcatttttagtagagatggggtttctctatgttggtcaggttggtcttgaactccaaacctcaggtgatctgcccacctcggtctcccaaagtgctgggattacaggcatgagccaccatgcctaacccataacacaatgttttatgtatacaatgtgatggttaaattctaatgacctcatcttaatttgatcatctgcaaagatcctatttccaaaaaaggtcacatccacagatacttgggttaacactttgacagcggtgcaaagcagacaaatggctaggcagataggggagtgtccctggtgaaaccccacctccaagccaaagacagtttaaagcctgaaagccaagctgcaagtcaaatccatggactggattgagaacctgtctttccatttgttgcactttcctcttattctccttcacctattttatatatacctaccctttcctagtccgtttttctacactgctgtgctcacctttgagtggtgtttttgctttagcctttctttgcatactcatgaaccaatcagcatgccctccctattctgagcccataaaaaccctggactcagccacactgagagacaactcgaccttcccatcccctctctgctgagagctgtttcctcactcaataaaattctctgctctcataacccttcaattttcagtgtgacctcattcttcttggatatgggacaagacccaccaaacgcgggggctgagcacacagttgtggcagccatgggagctgcaggccagagcacaagccagatgcatcccagcaggccaaataggtggggtggcccttgctgcatgcccggcaaaggggccgagaaaaatccaacatcttcctggagaacacaattcaactcacagccactaattatagaaatatacttatgtctagaatgccaatgccaggcagttatttatgagtaaacaaagtgaagctgccatcattccttcctctaatacttcccaatctactcattaatgcttttagtccctttattggagaataaaacttttcttggctcagtaagaaagatgatttcacctgcaggtgcaccttgagaatctccactgaaatgcacatatgcaagagtggctgtttcctggcagaaggtgtcatggccaggtaggtgcaggacaactaaagggttgtggcatgaaaggcttggtgatgaggaaaagctggaagaagcaggaaggaaattgaaagaggttgggagttgcagagatttttgtgtgtgctgattcagatcattgtatttttttcatccatgtgttttctgtcctgtggacttggccttggcactcaggggagagaacagtgttttgaaggagcctcttatgagcgtacatggtcccattagacctggaacagagaaaatcagaggtgagcagctgattcttctgacaagaacaagacaggaaaagaagaagaaagactggtggagtctttaaaagctaccttgacttgtttgtcttgcccagaggtaattaattatacatcatcacaggaaaaggcacatgtttcggaaatgctcttcagtgaactacatccatttgtgttttcaaggagtcaatccaggtgattaaggcagagggaggacttgtataaagagaaaaatctacaaagcagtttcattccacacgtatttgctctttcaaagcaaattcagcaggaaatccaaatcactgatgcaaacctttgcagtttaatttgttcccaggggcatactgggggccattatcccagaagcatttacatgaaaatcccattatttaaagtatattcattgtatttctgtttaaccctaggctgttcattgagaagttaacagtaaataggaagaaagttgaggatgataggaagtaactttgggggtatttaatgccaacaggaaggacaccagcttggcagcacttggaggttattataagagtttgtttaaaaatcatccacagcaacgagtcatgggctggggtgtgtgtgtgtgtgtgtgtgtgtgtgtgtgcaatctaggtgattttttttgaattggtgctttaggcagtgccagcccacaaagtcattgccactggccacttcaaaattctgaagtttcctattttgagaaaatctattgtttgggacaccactgaacttttgaaatctgcatagtaaggcacatcactgcacattaatactttgctggaggaagacataaactatcaacaaggcaaactatttaaaggacaccttggcataatttccttctagtccagccctccttaacaccttagcacacaaagtgacatgtgttaaatttttgctgacattggccccaccaagcacagtcggcctctgtcatacctcagggatgatagagcagccatgtctgcactctattgttggccgttcatccatcgagcccctccctacttcctctgccttctcttccctggttcattagagaggcagtgtgagtgcctctctaacccacacatggcgtttactgttttacagaaaaggtttcatcttgttccagtcatcttttggatgagcttggtagctgctacacaatagcacagagacagcagcgaggaccaggctgtgcaccctgcagtggcaggacctcccaggccactcatacccactggtagcccttgctctggcagaaccagaattccagggctatgttgcctcttctcttttgaatttgtgaactctttgcccctgttctcatgaattatgctcatgcctggttgtgccaaaaggaactgaccaccttctactcttctaagatgtaacccagggagatattctataactctgtatgtgagaccacaggagaacccaacaaactgcagtccctcaccttgcttctcgcttcctctccaggtggagatgtgtcttttttatccactcttcctaacgccaaagacatagaggaggagatagtgctcaaggaatcatcatcatcatcatcacggtcatcatcatttaaccagtctagtcctccaaaggccactcgatgggttaactcattgttaaccagttactgttattaaccagcttcatggtttgttttagtagaacacagagctggaccaaaactttatgggaagcagccagccaacatgtggcagtaccatgaacagaactacctctgtagggagcacaaaagaagccaaagacagaattcataacagcttaaatgctattcagtagaaaaggtatttttttaaataataactgagatacccatacaatggaatttatgtagtggtttaaaagaaagaatccatctattacatggatgtatctttatgatgtcttgcaaagtaaggatgcaaattgaagaacaatatatataccatgatcccacatgtgttaaaataaatatccaaaactattggcaggggaattgaaagaaagtttccacggttttatctgtgcaatttaaagataagaaagataagctctctcccttgaaaaacttccagtcaatgaaggaaggaaaggtgaacaaatctgacatattttgaaattgttctcctgcgtgttgcaagacatttgactagagatcactgcagggagagccaggacttgtcccggataccttcctgtaagggtcaggactggatggggtctttgaggaacgggtaaggtttggaaagatagagaaaaaggaggaagactgtaagacaatgtcttatgttgctgtcagtattggaagagtggagcaagaacacactctaccctccttcttaatcacagccacaaggggctcctatgcattttctcacattggtaaagtcattacagaggtttgcactccggaagttaataaaaactctgggctgggcatggtggcacacacctgtaatcccagctactcaggaggctgaggcaggagaatcacttgaggccagagtttgacaccagtctgggcaacctagtgagaccctgtctctaaaaataacaaataagtaataaaataaaaactcttgggaacacagatttatggaaggaatagaaatatgtattatgctttcagaacaaagtaaaatatcccatttcctttaacataaatatcaatataaagcaaagaaaaaaaaagcagcagcccaggtttgagtgtattttaatacacttaattgacttctgattgttttctgataatccattctctcattccactgattacaactattttaagcagaggcccattaattctgtattaatattgcctttctaatgaaaaatagattaagaatagcctttctaattgccctagactgattcctccttttagttataatatgctgcctaaagcctcctacttaggggctcttcctggttctaagaacttttaagtgcctctcagcagcttccttgctgtaataaaggcgtgtgaagccggcagtgcctcagctgcacacaattaatcccctaccaggatgctgctggatgaatgattcagcaacctttcaaagggcctggctaatctttatgcacagccaacatatgttacaacaaagttaatccaacatgcaacatcaagaaatttaacagatttattcatgggggaagaaagcacataagcaaatagacgaaggcagggaggaccaaggcagggtctgtgaagagtaggaactctgcctggacccggataaaatgttcttaggcaaacccaggcaagtccacaatttccacagtctactgaaatctgttgctttggaagataatattattttcagaaaaaaaaagttgtgtagtcaaataagtttgagaaacaatggcctaatcaaagttaaacaagtttgttctcactgcaagactacccaaaacctttattactgccaacatgcatagtgggtctccagaagcactgatagaattcagcatttctcaagcctttctcaaccaaaggtcctctgtggttatcattacacatatagtgtttagaaaacaatgacttagatcattgagcatatttcctggggacgtatacgtcctaaggcaatgtgtaatgctccaacgctgagttcccagacattgagaacaattgcagttagctacttggagttatagtaactagtaggcaagttaagccagtatactttgctatgtctaaagtttggcccttcttttccattataaggcttttgattattaccatcagatcctctacagccttactcctcaaagtgtgatccctgaaccagaaggatggggatcactgggaacttgccagaaatgcagcctctcaccaccccgcccagacctcctgaatcagaatctgcatttggttgagattacaggtaatgtccacggtgctacagtttgggaagctctgctctgcactgcagtgctggttctctacatcagcatgcaactggatcatctggagagaaggaatgacaagggccatggttgacattttgatacagcctcttgaccacagctgttttgaagcctgagtttgatcagtccggaaaacaaatcatcaaaacagatcctcagctcaccgctggtctcacctttcctattagcctgtccttgaagttcaaaacacccctcagctgtcatccctaaagtgatggaatgggtattattgtacagtatgactgggtaagactttttaaaccatccagtttttacattttcatgtgactgttcttatgcagtgtctgttaccctcagtttcccaaatcaacggaattagacattcctgccacactgaacttcatgcacataactagcaaaaattgttctttgagttttgcaagtagaagacatagattatgaggaaatcatgcattttttctgccgtagtgaacttgaagcatatgtgcattgcacaattaagggtgcagggctgagtttctttctgggattaggtcacaaagctcttgaccaggattaagagctcaggcagtggtcacaaaacagttttcatccatgtgagctaactggggagtgagccagcaaccttgatcccattaacattgggctgtaaggagcctgtctaaggagctagagggaaacagatgactatggaagacagagagtacatatatggctaaataattagaagttttccccctttaaaaaaaaaaaaagaaaaaaggaatgcactacttgactgacagaaatcaaagtccacgttttgtcttggccattcgaactggttgattagaatatggtgaaaggggagaggagaaaacatgtaaaacattaatgtttgaagcatgaccctgtaggctttcaaagccagtttttccagaaacctaactgattggcacagtctcaaacctctgtaggtaatttaaagttctggtctacatctgtcactttgccaaggagcgatacatgcaaatcttatcattattaataatagacttgaaacttttcctgcctaaaaccccagtgacgtgcttagagaaacacccattcaatgagtaggactcctcatttctctggaggaaggacagcaccgaaggtagggcacatcggacagtcatcccttccttcctgcttgaaagccccagtttctcacatcactatggtgctacagtttgggagatccgctctgcactgcagtgctggttctgtacatcagcatgcaactggatcatctggagagaagggatgacaagagccatggttgatattttgattcagcctcttgagcacagctgttttgaagcctgagtttgatcaatccggaaaacaaaccatcaaaacaaaacagatcctcagctcaccgctggtctcacctttcctgttagcctcagcccatccttgaaattcataacacccctctgctgtcattcctaaagtgatggaatgagtattattgtaaggagtaaggctgtagaggacctaatggtaaccatcaccacggttgttctagaaagaagaattttgcagtaatatctctgtccctcagtgtagccaccctctaggaatccaagaccaagccaactcagatgtcagatatctgagatacaaaagcagcacttttttcttgataaactgagcgacaagtactttcagagaagaccttgctggagaggctgcctgtgttctgttttgtttggttttctatctaatccctattcacatccatggaagtaaagaagacgatcctcaagccttgtccttcatttctttgtagcatcccttctttgtagtggctcacttgaatcattgcaaactcagacattgcatactcagccagcaactcagatggcaatgatttattttactattgtttgagacatcccaggatacaaaccctgtgcatagttagattgcatgcataaggcataataatagactctggtcactcgtgcagaccaagaagttctcagactataaaacagtgggattggtgccaagatccaggctgacgtaggatgctgaggaagcacagtgtgcccctcatctgggctaactggtgacatctattttaggtttacagttaaaaataataacgagtcacctaggaaatcaaggaggaaaggacattctagaccaaggacaggacctatgggaggatgaagaggaaaaagcttagtacatcttcggatgatcagctcagtaggtctggagaaaagggtgtatgagaaagatgagacagaaagagaggaaggtaggcataagggctgagcctaatgccaaaaggccttgtaagtcaagctaaggagtgtagatctcatcataggatctctaaagaacttaaagcatttgacagggccagacttgtcctttgggtccatcacccgccagcagtttggagaatgtgttgggatgatgtgacattggagatgaagggaccagtaagagaacaaatgcattggtccagaaggcagggcaatgagaatggaaagaggggaagacaagataaggagtgtaaatcccgagaaaattttgcacttagtttaagggtgggacaagcctcttcctggccagctcatgcataccgggatgcaggctcagcagagttggaagccagcatgctgacctctgggatggcagctccaacacagattgacctcatcccctaggaatccatggctataggatgccatatccctgtctccttgaggcatctggccactgtgttggctgtggtgtcaagttccctgcaatccagaaacacatcattcactcatttccttctggctacactaaccccacaattcctgcctctatgggtggaagagtctcaaagatgaatgtctgtcctgaaaacctcctgggtgttaaagatttcccctcaaagggcttcgaatgtaatcgcctgctcttgtgcccacagagcccttgaggactagtcttttgagctagcaattctaatcattccaagcaagcagctttgaggcaactgtagagcacagctggtcagagtcaagtcctgcaagctcataggaacatgtgctgccttgtcaacatcatgtgtttcctagagagccgtattcaaccctgtttccccactgtccaccaccaccagcactacccatgtgccaactagtgttctgggatcagtaagagattgtaaaagaaattaaagacacagtccctgtcccagaaaacttatcacctagtttgatgaagcagaacattcacagatgtacaaaatgacttaaaaagacattgacagaaacataatcaaaaacacacgtggaagaaaccacttcctgaatggaaacataccatcccagcatgtacgctgagtccacaggacaaagaaaacctccctttcaaacttgatggtttattttttttagagtgtaccttgctctagaaaagatttgaggaaatttacaagaatacatttatggaaataaaatttagaaataaaagtagagaactagaaccaaggtaaataagaacacaaaaatgccaagcataagtcaatccatgtattatagtgatggcttcgaatctaggtcttctttttcctgggggaagtaaagacacgatttgttttttagttcctgtgatcagatatatcagacagaggagtactgaactctaaaacttggttgctcaaaatgtggtccttggactatcagctttagcatccagggaaagctagttagatatgaaaaatctgaagccaactccagacctattgaatataaatctgcattttaagaatatgattcatatgcacattgaagtttgagaaacactgttctaaaagtcatccttctcctggaatgtcatacaggagatcttgagtaataaaacaggccatctatcggcagagctttttacaacaaatgtagtaagtgaatatgtctgatttttacagcaattttctaaatgacagaagatataataaaactaaacctaaggcaaagagttcttagacatgacaccagaagcacaattcatacaagaaaaattgggtgaattggacttcatcaaaatttaaaacttttactctatgaaagatcctgttaagaggatgaaagacaggctgcaatgtgggggaaaatacttgaaacagtgtatccaacattaaaacaaaaaaaactagtatctagaatatataaagaatccttaaaactcaacggtaaaaagaaatccagttagaaaataggcaaaaaatatgaatagatattcaccaaagaggagatatagaaagcaaataagcacataaaatgatgttcaaccataaaaaccagtaaggaaatgcaaattaaaaccgtgatattggccgggcgcggtggctcaggcctgtaatcccagcactttgggaggccgaggcgggcggatcacgaggtcaggagatcgagaccatcctggctaacacgatgaaaccccgtctctactaaaaatacaaaaaattagccgggcgtggtggtgggcgcctgtagtctcagctactcgcgaggctgatgcaggagaatggcgcgaacccgggaggcggagcttgcagtgagccgagatcgcgccactgcactccagcctgggagacagagcaagactccgcctaaaaaaaaaaccgtgatattgtatgatatagcttcaatatatgttcctgccaaatctcacgtggaaatgtaatccccagtgttggagttggggcctggtgggaggctttgggtcatggggacatatctgtcatagcttggtgctgagtgaattctcaggagatcttgttgtttaagtgtgtggcacctcccaaccccactctctctcttgctcctgccctggcaacatgacgcaccttctcccctttaccttccaccaggagtcaaagctccctgaggagtctcctgaagccaagcaaatgccggccccatgcttcttgcacagccttcagaactatgagccaagtaaacctcttttctctataaattactcactctcaggtatttctttataggaacacaagaatggcctaacacaccataccagcacacatctattagaagagctaaagtaaaaaaaaaaaaaaaaacagtgattacacccaatgctggtgaggacagggaaaaactatctctcacacactgatggcgagaatgcaaaaatggtacggccattatggaaaacagtttgacagtttcttatcaaagtaaatatgcacttaacatacaacccagcactcatacttctgggcatttatctcagagatatggaaagttatgttcacacaagaacttgtacacaaatattcaccatagctttattcatagtagacaaaaactagaaataacctaaatgtccctcactaggtgaatgacaaaatcaactccagtatatttgtataagagaatactactcagccaagaaaggaactatttatatacacaactgggttggatcttaaggacatcatgcttaggggaaaatgtatccaaaattatattctatatgattccatgtatataacattaccaaaaggataaaattgtagagagcagatgtgtgtgttcctttaccaagggacaaaggcagggacagaggtagagaggtgggtgtggctataaacagatagcataaggtaatccctttgtggggatgaaacagttctacacacactcgagcccaggcaaaaactagtgaaaattgaataagatttttaatctaattgacaatactgtaccaatgttaacttcctggttttgatattgtattaacagccataagagatgtcaccattgaggaaatctgggtgaagggatcatcggactctaatatttttgtgacttcctgtggattcataactatttcaaaataaaaagctaccccaaaaagctaaaactaaaagcaattaagcccaaaaccaaaataatatgatttagtgctactaatatgttggtaatactgctctccagaaacaaacaaacacacaccctgagtcttagcctttactaatttccatggtgtaaatacttcctctaacacatgggtagctaatttaaagctacccataggataaccactggctcacaaaattcctgcatgtgtgagaattgactctcagaagccagtatgaacaagttccagcacaccactgccttctgatagttggatttgatccttggaccacctgtatcagactcacctgaaggaacttaaaaattcatattcctggccgggcgcagtggctcacgcctgtaatcccagcactttgggaggcggaggcgggcggatcacgaggtcaagagatggagaccattctggccaacatggtgaaaccccgtctctactaaaagtacaaaaattagctgggcatggtggcgctcgcttctagtcccagctgctagggaggctgaggcaggagaattgcatgaacccgggaggcagaggttgcagtgagccgaggtcgcgccactgcactccagcctggcgacagagcgagactccatctcaaaaaaaaaaaaaaaagaaaaattcatattcctggccaggcgcagtggctgacatctgtaatcccagcactttgggaggccgaggtgagcagatcactagcctggtcaacatggtgaaaacccgtctctactaaaaatactaaaattagccgggcgtggtggcacgtgcctgtaatcccagctactcaggaggctgaggcaggagatttgcgtggacccgggaggcagagttgcggtgagccgagatcgcgccactgcactccagcctgggcaacagagcaagactctatctcaaaaaaaaaaaaaaaaaaaaaaaattatattcctgatctgcaagccagaactactgagtcagaatcccgaaggttcaacagggaatgtgcatttataactgtttcttcagattatctttaggttcattaaaagttgaacattattaataaggggaataaatggtgcacatagctctccaatgacctagctatgagaagcatgaagtagcttgaactagcaagccagcttcccccatgttcaaacctatgttcaaaggagtagaagatgacttagaatttggcatcagattttgtcatcaactagtaaaaggagggaatcaaaggctgatgacttcgtgggttgttgaagctaagctcctctgaactcccaagtatgagcactgctattttccataaatggcttctgcctgcaacaagagtttcaatatgttttgtacttagtattgctaagaaaaaccagggtttgattaaactgttatgggtaagaatttttttttaagtatctaacattttttaacatttggtcttattcagtggttcccaactttgagggcacattggaatcacgtgagggactgtaaaaaacatcgatgcctggtcctcgctctgaagattttgatttcattagtgtgggatgtagtgaaggcaccaggcataaggatttaaactccacaggtgattctaacgtacagccagggctgagaaccactgcctacttctcactgaatttggttcactgctacatttaggttatttaaaatgaaaattttattctttttgagtaggtaatactattaaaaaatctcataagtcaaaatgatttttaaaatatataacaaaaagtcttgcttcctccctgatcatctaccccatttctgcttccacacacacctacacacttaaacaggtattttctttctgaaattctttgtgcaaattcaaaatgtaaatatgtgtgtagtatattcctattttcataaattccaataagataatataaggctataaatacatatatattttaaatctacaaatagatctctagataatatacatacgtatataatatattcacatttgcataaatcacttccaaagagacaatacaaagctgcagatatacatagagatatataatattttgaatatataattctgtgtatttctagccttatattgtctcataattttttataatgaactcgacaatgagttatatttgttcacatgcttacctgaatttggttcacccaagcgtagttatttaatagataccgatgttgactcagttgtaattatacaaattgcaatcacagtggagggaaaaggatcctagaactacagcagcaaatatcatattggtgtgtgtgtggaagagtgtgtatacgtgtgtgggtggagtttggctacactagctcttgagtaaattggtaatattgagtttctaaacctgggaattagagaatcaaattttgcactcactcattcatctgaactggctcttagaaaatatgtatcccacataagacagctaagacagcccgttatccccctctttacaacatctctcagtaagcagtcagaaaaaaatgtcctcctgagtcaacatctactcttccgggaccctaagcaagagatgttggaggtcacaagttggaccagttattgtccccaaacaagtttcataaagcccacatggtgttcttttttctcagattgaagccagccagcttttccaaaattgagaactttcatacagaaataatggatttcaggctcccacttgtaccatcgagctcacactccgtggtaacagcctgctgggtgtgagtatggctgtgccccttaggctacgagatagtcagagctccacaatccaccagcctccctggcactcagaggcacacctgctctaatacacctattcctatcacctgcctggcctgccacacctctgagcttcctccattcttcatgggaattttcactgcagaatccatcatcacatcatattgagtcgactgtcaatagtgagtatcccatagacagcaagtaccaggcatgagacaatgttctcagctctgccccttttccagtcctggctcacgtcaacattgacctctccagcctgttccgggttccctcatgtttacaacacccaaagcatcaaatcccattgcaatgacaaacttcaattgctagagcagtttttaaaatttactttgaagatgcttacacgtgccactcctgggctgatttaacaccaggctttggcatccaatggcccttagtgattaataccactcatttgttcaaagttaacagcccctgagtgacagccatagataaattaacaacattagaaaaacactaaagccagcatttatagagtgggtcattgaagaatatgatagctgtacagattggctctgcctataatacactattaatgaattttatatactgaagtcatttttacccagtacctttttaattgttctgaagttgtccatatttatcttgattaaaaaacaagccaactcctagagacattaatgggttttatgtgcttagaagcgaatattataagcagatggaggaagtgagtaggggtagagggagagagggcagggcattgtatttccatcccagcactttgttacaatgaactcaaggtgttgagtaatgggctgctataaattagaagactgtttacctcataatgtctgccaaagaaatgtagccaaatttgggctttgccttttctctactcagacctgaagcttgttaaaacaactggctgtggagaagtaaacatggctccacactcttgccttaaattctgctcccggtgttgcagggccatttataagaagctagcatttagctcctctttggactttgttcttaacatgaacatttaaacttctcctgtaaggaaccacagagagtagaggtctcgtgtcttaagagcgaatgttgatttattccatttatttggcacagtgcaataccaccacttagaaagttgtagcagtgggaggagcctgacccacacattttatggattaggaaattgtgaccggaggggttaaacatagggagtcagaaaggcagggtgtaaaggccagattgaaaggtcacacccccagcagctcacagggttctcctccctcaatgttccaacaccacccacataggaaggaggaagaggcagtgttcatttcatggcatccatttgggggttacctggcatagaaagatgagacaataaagcatgcgtttcatgacaaattttggtgctcagcacgtttcttcctgcagtacatcttcctaaagacagcagccaggtaatgaaagtgagtgccagcagtgtactgaacaaggttttctgaatgagttgttttgagaattacccacgtccaggtaacccctgtttgctcccatttccagtgaccatcaaaggtctaagaataaaaccaatgctggaattactaaaaaaaaaaaaaaaaaaaaaaaaaaaaaaaaagaagagagagagatcctatgtcttgtttcttgggtttaaaacagtgcctagtgcatcttctgttactgacttgctctgtgagtttgagttgcctattcttggcatctgtttctctgtctacagccatagaatgacggatttggcttagcagatcattatggtgactgagccctcacagtcggtggatcacccatgaaccgtgatggcagctgtaatgggaagggggccatgaaaccagggtcactcagctgcggaagaggagtcttttaacaaagaacttaaccaaggccacacgatgcagggacaaccaccaggcctccagtgcactgaacacagggctcaacagaggtccctatgatgctggtgggcctgatgggtctccgaacgctggtgacacttcaccccagcttcttgcccaggttcttggcactggcacaggaagaaattcaaggatgaatcaaagcaaaaataaagaggcttttattgcaaagtgaaagtacacactcaccggtgggagtgtcatgtactccaaagagtgagtcacactcaacagagtttggggtctttggctttattggttttgaggtccagcaggacttgtttactggtcacaaccttgctgaccaaaacaggacctgttctggacaggataaagtgaggaaactaacaagaaccagcaggtggctacaaaactgatccctggctgccctcattgctcattggtgtaagacacacactagtgctataacagtttacaaatgtcacggcagccatctggcagtcaccaccccctttccatggcaacaacccagaagttactgcccctttcccataaagttctaaacaacttgctcctcaatttgaattgacccaccccttaatttgcatgtaattgaaagtgggcttaggtgaatataaatgcagttgccacagtccgtaggtgctaactctgggtgcactgcctgtgagttagccctgctccatatggagtagctcgggttcaataaaagattgctgtttaaaatcaacttgaattcttttctgggaaaagccaagaacccttatggattaagccccaactttgaggcttgcctgtcctgcatcagtttctctaattgaggtgcaaaataatcataaggatttctgagaagagatgggaatttcttggaattggggtgctacccagttttagacccagcatgggtatacctggaatggtcatggcactggtgggtgtgtggtttagtataataaagagcgtataattgagtctggggtaaaacttgggtcagaccaatttcacccacatcctgtttgtcagggtgttatggtccctttcccaacccttgctcctacagctggcttctatgttagtcagtgaaactgctgcctggtattctctatttcccctgtgaccacacagtattcctatctcacctatgccttgtgtgaggtattccttattatcagtgtcaagaatcagtggggattatagaaaagaggtagagggaaagtaggaggactcaattcccattctacttgattgctgtctaccatgggactttagggatgtctcacagctctcagcaaagtgaatgggctgcacaacacaattttaccagtggaggatcctgactatgagtatccaggttcttggtgtttggaacaaagaaacggacaaaatgcacaaacaaagcaatgaaagatgaagcaacgaaagcacagatttaatgaaatgaaagtacactccacagagtaggagcgagcttgggcaagtggctcaagagcactggttacagaattttctggggtttaaataccctctagagtttcccattggttacttggttacactatatgtaaatgaagacctgaaccagtctgattggttgcagggagggaccaatcagaggccgaagcgaagctacaaagttacaccctatgcaaatgaagactggttgtgggaggggatccatcagaagtacttaccatttttcatctgcaatgcagtagaagtcggggagggcattggaaaggaagtagcctctgatgcttttgttacttgggtgtaaaaaggtggggttttccttttgattccgttctaggaagtcactgcaaatcgaatcggccttaggttccctgcctccagaccctattctcccgcctcacagtggatgagcaatcagacacttgcctgcttgcaaacaagcacaccccgccccaccacacccccacacccctggccccccaccccgcttcccctgcttccccgccccccgccccgtacccttccagcaaactcaagacccacagggccaggcagctggctggtgctggacaacaggcctcaggaggctgcttagaaacctgccatgctgagcacttgcttagtattaaattaaactaagtttgacctcaggcggcatctatacccatgttcctacttaacgaactgcaacctaacttagtacttaaacaaactgaaagcataactaggagtatatttttttgtaacaaccagctgagtctcagccaatcacagcagctgagcttcaccaatcacaggcagcgctgatcaaaccccacccaaataaggcaaatccagctgtaaccaatccagctgtttatgcatctcacttccttttctgtccataaatgctgcctgctggatggagcgatctgaacctcttctggttctgagagctgcttagttcacaaattgttctttgctcaattaaactctgttaagtttaatttgtctaaagttttcctttgaacattatctgccctgccttttcaaacaccaggaggtataataatatgtccacacaaaacactttcatggcccgcaatggaacaccagtacgttctgtctctcataaggcactgtggttgttacaggagaaaaggaagttggttggtgagtctttggacagaatgggggatgtggtgtccctctgctctcagacatttttctcactgcaagcatcccagagaacttccaggaaggcaagggaagagagcagacatgagactatagcatgcagcaagcctgaagacccctaggtggagcccacttttgagtaaattggaccaacccgactagacagacttcaatggagaggcagatgcttcagtactgataaaaagtaacaaaaaggagcgaagctgggcacttcttatcacctagatgtcagaactgaggctcaaccctgaattttcaaagacttaagtgcaaaactgacacccagaaagtataaatagagcagggctggggtgggggagttaaagcaaaaggaaaaagtgtgggggggaagtttttaaaaataataaataaataatacataactaaataaatggcttttcagaaaatgatcagaatgaagaaaacacaagtgcaatgctaaaggaaccacagatggggaactccccaagcccctgggtgctagaggctctatatttagaccaaattaaatgctctgaggccccacccttgtaccatcaggaatttccctctccaaacagtataaatgtcccctaggggtgatggcattaaaaatccctctctcaccctgcaattaggtattttgtacatgtttccttgtctgttgtccaagttctcccattagactgtaaattctatgaacgaatggatctcttacgcttgtccacagattctgagcctatgaagatggtactagtcctcgataagtatttgtgaaatgagtagctgaatgaatgaatgaataagtaaaagaatgaatgattgaatgatcacttacaagctgctgcctgaggcttctacccttgtagcccctacgtacacctcaagcactgttgctggttttgcatcaaatcttcttgtagtgtagccagaagtgtatccaggactctgggattttcactaaccagctgagaactacatggtccccatgctggggccaaaccctgcccccagaaacacggtctgtgttgctaagcctgacgtcctatcctatctctatgaattgttcactaggactgttgttcctgcacacagtctggcctagtacaacaccaccctagatcaatctggtatatttttataacctaagtatggtagggatcataatcctggttttagctccgtttatgggaagacgtcctgctgcctacacttaaactgatggagctaaataatgaatgggcaggggcttccccaggtctcactgccatctaagggctaaagaaaaatgaagaagatgaggaagaggtgagggctgtctccacccaccaacagcacctgagtcccaggccctggctcaaccaaaacgaatgttttgttacagtgaggccaggatttctggacagagcaaaccacagcaacagaaaacagtcatttgagagaaacagtggccacactgccactccttctatggtggaacgacagaaagtacgtagacgacaccgatggcctttagacaccagctgccctggctgagggaaaacaagaagcatagtttccattgctctgtattacatcacttttttccacattctttaatgacctaatgattctttaatgacctttaatgacctctttgcagtaaaatgtcccaatgagaatacacatttccattaattaaattcaacgtgcaatcaaaatggtgtcactaaaacagtgggctgtcctagtcttggtgtcctctaaatatggatccacttttcccagcttagtactaaacaagttgagtagaacgaagagtaaacacaagtaccaaaaatatcacagttattattaataaatgccacattgaagcacatttttttggttggagagctcagtgggcctgctaactaaatcccagaattcagcagtcttacccacctagcagtggaccatgcagacttcctttcactctcctactttgcaggatggtaaggaccatgctgtatgcctaagagaagtcttaggcctaaagaactctagctctctgcagacagaatgctctaataccgttttcaagactgcaagttatttaaagtcacttcttgtcttcaaaggcaaaggaacaaaaaggtcaacagaatccacttgccctgtgaaaaattccgttccccgcaaggaaaagaggaagcaatattttccaccagacttgccctgtctgataagtcttggtaagccaccttattgattgtcttcaactgagaagacaatcaattttgagaaaactggaccaaccctactagacagacttcggtggagaggcagatgcctcagcactggtaaaaatatcaaaaaggagtgaagctgggcacttattatctggaatccttcctcttttcttgtcttgtggacttgggcagctcacgtgacctctctgggcactggtttcatcacctgcagccacacaatgatggatttgggctagatggccaccaagtatttttcagctctaacagtctgcaaatgacatgagattttctcacctttgagccatataggaattcccttagcagagaaagaatagcctgtgtgggaaactatgaattttaccttattgctttccctaaataatgccaggggtgccttagcccacccagagctttgctgtaagtaggacaattgctcaacccattctgctaaccaagttttctcattacccttttcctctggaagttttgagcccatcctgctacatctgcaagatatgagacaatgagaggttatgggatgacacgcttgtttcttctggcttcctggcattgcctcttctgacaatgtgagtctatggtacccactgtaggtcagggtattttcaggagtatattttcaggagtattcatcatatggactttccttttgcactatccactgagtttccaaacagcaagattttactttcctattcaaactaaaactcctacttgtctaggagtttcagttttaagaattaaagtacaagtaactggtcatttagtcttgtctcatcactggtcctacataaaatgcaattaacaatgaattatacttaatatggtgttaaaataagaatgttctggtctcagcttctatcttgactgtgtgtatgcatatgtgtaaatgtgtgtgtgtgtgcacacacgtgtgtgagtgtaccctggagtcgatttactcctgagagtaggtgtaaatttataatctgaaaatgatttatagctgaaaaatgcatattgactttgtcttacaaactcagccaaatattttctttagtaccactctgaagactatcatctgcctctaattgattttaagatgcaaggatttctcagaacctgggaagtgtggttggaaactatcacatacttaccaaatatgggcatgggtttcaaaaggttaagaaataactacatcatttgaaactggataaccaaacattttcaggaaattgacttttcttatgacatggacaaggtttcacataatatttcagctgtttggggaatatttcgctactttcaccactgtccatttccacccaaattcaggtgctgtggttttgctttgtaaaccttcattgttcagctgggtgctaaggacttctactgtctgttttgggggatttaacgaacatcctggatggttgaaaacgggcagtaagaggaaaattgggcatgtagggaaatttggatgggcatgacaaagctgagaagcccaggctggcatctgtgctgaacaatgcactgtagatgttcaggcgtctgttgaaggaagaccctcactgcgtggcagcaagactaacaggatcttgactcctcaacaggaacatcgtactgtgctatactcattggaagggtgaggaatggtctgggagagatggctcaccttccacagggctcccaggcactgcccggagatactggagagtatgcccttccagccatactaaccccagctgggcactctggtcccagccactccaatttccatgaagcccaagtctcataccccttgtcccaccccctgtccacattggatccctttcttctagcatgacaggtagcctggttccttccagagtatttttctggtctattgttacaacttaaacttacactttgtttctcttgggctttcccctttgatgcccagtttgaaagttaagaatgaacatttggtatttctctttacattcccactataacaactccaatgccattgaaggtgatgttgatatatatgattggttaatggacaagtcatttacaagtaaatgagggaaagaaatgcaaagagattaaaatcctaagagtatctcaatatattcagactcatttgatgttagttgcttctaataccttttaccaatttatcatttaatttgtatgtttccttatgagtttttgctctttcttttttgataaaatgtttccctctttatatattttttaacttaaagacagcagagtgtgtaatatttttggagtcagggctatgtttacgtttcttattgtatgcttagcaggattttccctttccatttaaaaaaaaaaatcactgtggtagggaattttctaattatttctctgtcactcagtccctataaattctctctcaattcagaaggtaaaaatgctagattttcacttccccagcttcctttgcagctgaagtggtcatgtgactcagccctggccaatgagagaaagcagactattctggggggtttctgggaaagatttttccttggttataaaaagagagatctaccaaggagtggcctcctactgtccttgttacctccttccttcttgtttgggggagtaagtcccatttaaacagaatgcttggagctgtgatagtcatattgcttccatgagaaggtgtacctgaggacaaaaagtcaaacagatgaggacggcacaatcaaagaatataagagccttggtgacattgttagacctctgaatcaacctgcaatcgccttcctccagaatgcttgtgataggatatatgcaaagccttcatgtgttaagacactgtgactcaggtagctgatgacttacagataaaaaaaaatctcactgatactctcactcatattttcttttagtttgtgtgtgtcatttaatccaaattcatttaggatttgttttgttatctgttgtgaagtttgtttttttgtaaatgcttaatgaattttcccatgaacatttacttaaggattcatattttatttaatgtttcaaaatgtcacctttatcatatattaaatttttatctataatagaatatcatcaagcctcaaatttctcattaataaaagtataataataatagtacttataaggttgagagataatgcttataaatttctaagcccaggtcctggcacatagtaaatataaaatgtatgataactattattattactcattttcatttctattattaaatgatttctatctataaacacattaattggttttattttctttgttttctgtctttggctacatattttcattatattctgtttttaattctaatggcagttagctttatacttggaaaaattatgtttgacctctttttccttaactgtaaaatcaagcataaaaatggcatttttaagcctttcctattccaaatatgcagtttaacactttttcaaattccacacttacctattgctcacttcctcttcttacttcctgtatttagttagtaaagtctgggatttcagaccaatgttattataattaaattttgttttatcttaaatatattgttcttcaagaccagtctttacatttgtatttagtttggaaaccatattaagcaacttattcaaacttgatttcatgtttattggctatatgtttatcacatccactcattctttttttatcagagtgtataccatcttacagcttctttttgcttctctcagatgtttggagtctattttaaataaccatctttaagaaagacacatgaggacatgtcagtgacaacttgtcttttagagaatgtcttcctattgtctttatatgaaaaaattacagaaggaaatctgggatcaccaaagggaagtgaaaagtagaagataaggtcagagagataatgctagagaagggatgattgccaataggtggtcaatagggtggatctccttaagcttatgaaagatttgggctttttcactgtaaatatccaggagagccattgaatggttttgagctgaggaatggtgttctaactttcacttttaaatgataattctggctactgtcattaatgggcaagagaccattgtaatcatcaaaacgagacatggagatgatgatgtcagggtgggagcagtagagtttctgaatatgctttgagggtggagacaacaggattttcctaatggatttaatgtcacatcggagagaggagatggcttgaccctgagacttgggttctgaatgactgaaagaatgaaccttccatcaactgacatgtggaaggctatgggtagagtagctttcagggaagggggacaccaggagttcagttttagatgtgatgagtttgagatatccattattaggttgacatgaaagtaactgcagtttttgtcattaattttaatggcaaaaagcacaattatttttgcaccaatttaatagttaagtggagatgcttaatcagcatttgcatatataagcctggagttttggagaaagggctggattggagatactcatttgggaatcatcagcatctagacggtatttcaaatcatgagcctaggtagactctctcagtaatttttttttgctccctacattgaattcctattttctctttatgcatatttgagtaagagtagagttgtattttggtttggttttggtttttttagagactaggtttataaaagacacaaatacattttactggtcttggccctattcattgcctacttcagagtcagctgaatcctttctccaatccatagctggagtgcaggctcatatgctcagctcctagtccagtacagcaggtacccacctaataccattctgatgtagtgaggtggtatttgtctctcatctctgctgctggatactctgatgtctcaaagtgttcaagtgcttagaatccacaatccagcatgcactaccccacagtctttcacccaccatggccaagccctccagccgttccttcttttctttttgttttttaattttctgaagttatttctttaagaattacaacaggcaaaaactgtatggtaaatagattcctccccagactcagagcctggggtgagatacaaaatacctccctacctgtatttcagtgggaatattattcatcatgacatacagcctgaattcaccaggaaggaaaacctggttgttctcccaccagccccatctgccttgctccatgttctggctttggattgttcataggaagagctttagtcttgctctgtgttcaaaactgctttaatgggaaactaaaagagatccataaaaagctactagtcagatgccattttaagccagttcaatggcaaaacacagtcacagaacacatagtttgtgttaatgccatagatttctaaactctcatcagcaaagccatcatgctaaagttaacagagaaattttaaacagttgatagtaaatttcctccctcagatctctgaacattttgtaaactacctcatctttcttccagctacaaataatgtccagttcactctcaggatttagctcgccatggaggcaagtttgtatacattttcccaacaaggtataaatcccatagctaggaaaaagagtacttttcagtctctaaagacacacccataaatatccaatgtaagcaaactaaaattagaacatgcgaccagttatggagatttggtctgggcccccattatcctcctcctgtcaacacccctacttggaaaattaacgtttattaggttcctatgtcacccatatttaagattcctgtagcactcacccttctttattcccccagagccaggagaaagcaggatgctcctcatccacctatccttggactgtggaaactaggaaaaaataaaaagtcatatttgcacttttatgatccaagatgcagctcaccaagtgcaattttctatgcaacatgcaaactaagtccaataagtaaaggattaatgcgtgaagaattcatgatcaaggtcacactcaatcaaagacttgctagaggtgtttgggaattgcgtatatgttgctagtgggttgcttagagcagaaatcaccatcctcagccgggtgcagtggctcatgcctgtaatcccagcactttgggaggccaaggcgggcggatcacgaggtcaggagatcgagactatcctggctaacacagtgaaaccccgtctctactaaaaatacaaaaaaatttgccgggcgtggtggcgggtgcctgtggtcccagctactcgggaggctgaggcaggagaatggcgtgaacctgggaggcggagcttgcagtgagccgagatcgcgccactgcactccagcctgagcgacagagcgagagactccgtctcaaaaaaaaaaaaaaaaaaaacaagaaatcaccatcctcaaggatttatagttgaggtagataataacaaagcaaaaggaaaacaaagtcacagcaacacagaagataaagggcaaaactcagaaggcaggtgtaaatttttcttcctttgagtttccagagttttacttcttttgaaacccttcttttacttttactacaatgttttgcccttactggaacttgaagttatcccttggaagcccattttggtgctttgcatgcggtagtcctctataaatgcttgttgaattaaacagaagatttgtaatgtggtagattagcacacatgtgtgcacacacgtgtggttaaatttttttcagtcatgtctaagaccaaagaacaagagcaggtttggaatggagattagtgatacagaaatggaggaagattcaagctattaggtgtaatgtaaggggttattgaaatggcttactacaagcagagaaaggaagtggaaaatgaaggaaggtgacttcaaaggatgaaagaggaggccaaagaaccagagggggaaaggaaaagatttaacagagtaagaacaaggaagacgttgaagataaagagattataggcaaagaaagagagttcagagctaaagacctttgagatcttcagagttccaagtgctgatgaaatctacagtggggaaggaacctggctgcaccacacacaggctaggacgtaaacagcgctcccacgtggtcgacacaaggaccctgaagaaaggctgtccaaagagggctgacctggagacagaggtttatggggtaaaggagatcaaaaccctctgtggccaaaattttagaataatcatgggtggagggaatcatggtgggtggaggtgggattacggtagaaggtagaaaaggaagttaacaaaattcacatctattgttacttcgtaattgtaaagacaaccaaattcttcggtaagatctacaacaaacgattagaaatctccacctgcatttttaaatctttttttttttttttttctttttgagacagagtctcgctctgtcgcccaggctggagtgcagtggtgcgatctcggccgactgccacctctgcctcgtgggttcaagcgattctcccacctcagcctcccgaatagctgggactataggcgcccacaaccatgcccggctaattttttgtacttttagtagagacagggttccaccatgttagccaggatagtctcgatctcctgacctcatgatctgcctggcttggcctcccgaagtgctgggattacagacatgagccaccacgcctggcctaaatctttctttacaatagataatatagtacaaaatggaacctgtttcttgagccttatggtagggagtgggcagttggggaaggtgctcttaaatcttatctatcctgtaagtaaagaaaagtagacccttgataaatgtggtaattagaattgaggtaaaataacaattctagaaaagaaccacaaagagggacattttgatagccctagccttacagcaaattgaacctggatgaatgactattttctacagtacggtatatctttttcagagagtaggatggtgagtccctgggcagaggtggggagtagggaatggaatcggtagagttgcactcacagaagatgaataagttcttggagatcttatgtacagcatggtgacgatagttaatactactgcattgtatacttgaaatatgctggccgggcgcggtggctcacgcctgcaatcccagcactttgggaggccgaggcaggtggatcacgaggtcaggagatcgagaccatcctggctaacacggtgaaaccccgtctcaactaaaaatacaaaaaattagctgggcgttgtggcgggcgcctgtagtcccagctactcgggagactgaggcaggagaatggcgtcaacctgggaggcggagcttgcagtgagccaaaatcatgccactgcactccagcctgggtgacagagcggactccgtctcaaaaaaaaaaaaaaaagaaagaaagaaagaaagaagtgtgctaaaagagtagatcttaagtgttctcacccccacgccccctcccccacacacacagagtaaccatgtgaggtgatgagtatgtgaattagcttgactgtagtaatcatttcattatgcttaaatcaagtttagcctaaaactgcctccttacatattttaagtttggcctaaaggtttttctgtacatggtgaactataacaagtggacgtataaacagactgtagcctgcacttgtgccaatcaccaagttttggcccatcaaatgtagccaactgttataaccgtgttcgaataaggcaaacactgggctataaccaatccaactgtttctctacctcacttccattttctgtacgtcactttcctttttctgtccataaatcttcttccaccgcatggccgtgctggagcatactctgactctgaaggctgccctaatgtgtgaatcgttcattgctcagttaaacgcctttaaatttaattcagctgatgtttttcttttatcagatgaggatgaggatgggatccaaagaagagcttctaacgacccccgaggaatgctgagtgaccgagcaaggtacccactgaacccaattgtgtccgttgatctcttggagcagccagggatcctggtgagttctctctgtttccaaagctgcacagatttgtgttttaagctctccaagttcctttgagcaaattcctgatccaaagtggatttggaagtcacgacagaaactggactgggtccaagattggatttgatctggtaattaactggcttggatccagttagaggcctcttacatctgggtcagaaagaaaccagtagtaaatggcagtattgcagagggtataaaatttggctgttggaaattcacaggaatttttgtgttctaccccgttgtttcatttttattttgcactcaaatatttaaaaaaaacatcattggctaagttaattaagaaaacctgaaaggaaaaccaatatttagataaaaatgggatccttaatttctgaagaactgagttccttctgtgttatatatccataagtattaggccccggaagcagcaaaatcttatcgaaatagcaaaatcttactaaagataatttatagtggaacattccaaatgaacaacattgcactgaagtgtatttgaaaatgaagccttcctaattagcctcatctagggatgcctattgatatgcagaggcttctaaaaagatttcagtatttttatttgaagactttacaaaaggcaaataaaaagcttaagtgattaattgattaaaaaatttaaatctgccttgcagtctttgctgacagctataggtgacaggattaggcatgtacagaaccatggaacatggggaactttctttccccaaagggggaaacttgagagctgatgggactgctggaaaagatccctttgtgactgacaagtggctgcctgaacttttgattcagtattgctgcaatgggtgagtctttctctggcctccttgagctcttcaccttccccaccctgctgcaggcaatgcttttctttctgtttctctctgtgaaaaccggttgcgggaatggtaaaaatcaccacctctcgcaaagttttaattaatgagaaaaaggattcatgaagctagtcttaagctgtagcaaatctagcgtactttgtgctatgaatttgtctttttgtatccttctgtcatgaagaggggtgccttaggatagaacacgggcttgggaccccataagttcactgttcaagacatcccagcaagctggtcagtaagaaaccttcctgcaggtccctgaaacaacaacaacaactggatgaggtttccaccttgtcttgttttatgtccttgggagcttgaccttgtaaccaagtggtggtactttctcttgctctccaccatccagggcatgggaattttgggttcatgtcaaaggcattgcaggtgcctttgcaagctcaacattagctgctctggacttcttctgggaagagcaatggagattgcccagcactgtagcttagtggctaaggctttgctttttcacagcggcaacccaggttcactcctggattagggaatcagtatttactggttgctatctctgtgacctttaccgtttgttgattcttggcccctccatgaacaacttccagcttctcttcttgaatcttcctttctctcagctacctttaaagattctagatcttataaaaactgctaaccacctctttgaaaacaccttgtacactgtggttaagtcataacattagttaaggcttgttggtttcaactgtaacgttacttttggtaaaggttaaaaaccagatatattggctgtttggcctcgctaaagtggagtgactcggctttctctattgaacagatttttatgtatgttaaaggataatgaaagagttttgtttgccttttgaataaaatacagaaaaaagaaggggaagacaagagacagatcgtttggaaagctaagtcttctttctatcaatgggtgaatgtttttgcctttttaaatttttttgagtcatcattttggctaaataaatgacttacggtgacttggaattctatttcataatatcaagtattctaaacctttaacatatttgataagcttccccaaatcaaatttcagcttcaaaattgtcttttctgacctctaactttgggatgctacacagggcccctgaaacatccaaaagagaggtcaacaggattatttgacatgtgaagttacatgggaagcattgtcaaaataaagaataatgtttaaccttctctaggttatattttagtgaatgatattaatatatgttccaaaattgtatgggatttctaaaattctaatatgtctgagtatatgttatcaatcataattatggttattatgctaagttattgtagaccacagaaataaccaaatttccatgtcaattgtgtctttataactacttaaagtcatttccgcagttaattgcttaatgctgatgcagtttccgaaaactttacaagcatgcaaaatcctagcatatggtgtcttttaggaggttcctgaaaggatggaaaggaccctgaaaagtattcttgaacacaggtttctagtaactttagaattgtatcatttggaccaagaattcctggaactttaatgaaaagactgactggtttataaaactgttaacccaggtagaataaaaattaattgaataccaagaaaacactttgccagattttcatgctaaatcagccaatactgaaattgtttagatatacaatttgaatcaactctatggtctatgtcaaattacctatgaaaacccatcagttatcagttctatgcaactgaattggagaaaccactggtattcaagagggcataagtccagtattaagcagggactcatggagaaccaggagggcagccttggccttcctgagtccttaaagcttttcttattaaaagttctgcattccatgactcatcatggaaaggataaaatgatccaaattaaatatatatagatgtagtgactttaaattgcaaaaatagtttatgaccaatgtttggtttgtcgatcccatattcctgggaagacaatcaaagcttcaagcacatttggctacctgatgaaccgtttaaatatttatagagggatttcactcaattgtcattttcaatgcatgttttctggttgtataaaagctttcccatgcaagagagctgatgttataacagtagattattatatatggcacagtgtattttcaccaggtaaagaaagctttttatggttcactgacaggacaatcaaccccttcacaatctagaacctgaagactggatcttctgagaatgtcagagaaagactggccttgccatacacactgcaacaaaactttaggaccttgaaccttgatttcataatctcacacctgagaagtttccctccacactcttggaactgtacacccattggaaccctaaaggtaaagccaaccaaagaagtttctccctggaaggagatagcatccttgatgtgaacagcttttcccaagatcacagatcaagacttctctactatcatgagactcttatctttgaataattttcccttgcttatgcctctgtgaacaatagaagtgaaagggagggggagtctgttgtgtgcacttatgaggtatacttatttctgaaggattttgcagacagacttatacatggataaacttctgccttgatagatgaaagatgaaggcccaatgtaggtgagaaattttaatggtatatacattgcctcacaatcagtcagaaacaaagcattggtcactcctcttaatccacgtcataggttaaagagaacattgccaggaggccttcactcttctaaaagggcatcatttgttaggtcctatttccatggcttggagtaaaagagacagtgattagaaatgcattcctcatgataggctctatagcagattctactgtaaaggctgtggttacacaagactttaaattctcttgtgaaagttatgttaaataatagaattgctttagattacttactggctaaacagaagtatctgtacagctgctggcacttgtggcctatgaagaaatacatcacatagggtattatagagattcagttgtaggggattaacaaagagactgcttagttgagtgagtaaactctttagctccttttttgatctatttaattttaggtggtttcatttataaagaccctgggtaaggagcatactccaaactcttggtgttatcctcccaacagtcataatagtgtctccctggtgcactgtattctctcaaaagttttaaatgtttgcatgcagccatctctgtcatgtcaaatggtctctcttcaactggaatgacaagaactgaaagaaatgtgtggccatgaaggcaccataacctatgaatgacatgctgagaccagaaacccaaaatgatggtaattgagagtggtgctaaggccctaagttttggtcacactctcacctaaggggagacttttaaaacaaaattatgggaggccattgttcaggactgagcacatgcattaggccccaacagatcagaccaaaccaaaatggagctgctggtgctaaatgtcacatcaaactaagactttaagaaaacatacatcctagaacagaccaggttttttttttctcctgtaaacaggacgtctcagcataaagaggtcccctctacactgacccttacaaaaaacgaaataaaataaatgaactgaagtccttgtccccaccttacaaacccactgttctgctatttcccagtgggtttcaagaccaaataagtatatttacaatagtgataatgacatcagtgactaaagttttggtcagtctctcaaaattaagaagatgaccaaaagtggggaattgtttaatcaggtttagcctaaaggtgcctccttacatattttaagttcagcctaaaggtttctctgtacatagtgagctataataattggaggtgtaataagactgtagcctacacttgtgccaatcatcgagttttggccaatgaaatgtagccaactgttcaaaccatgtgcaaataaggcaaacaccaagctgtaaccaatccggctgtttctgtacctcgcttccatttcctgtacattactttccattttctgtccataaatcttccaccatgtggctgcgatggactctctgagtatactttggctcagaaggctgccccattggtgaatagttcaatgcttaattaaattcctttaaatttaattcagctgaaggttttcttttatcactatgtatatcaaaacatcaaattatgttgttataaagctattattttaaaatacaaagtaaaaatacagtaagtacttttcacaggaaattgtagaacaaaaaatcccagactttctctacagaagtggcccatctggcctgtgcactaacctgggggaccttgaccaaccagcaatgccactgcctcccactctgcctgtgaacctctgcaagataagaatgctacttctgcttggagttgagacacatgttttccactcttggccagaactgaggatgagagtgtttctctttagcaacagtccttaggcagagacaggaagggtttgactttgtggattggcctcaccagtgtgtttttttggcctctggtttatgctgagaatttttatccacaggtggatgcttgtattggttttcgcttgggagtattcgtctgagaaatcactgctgcaaaactgggatagtctggctcaggaaaatcaagctttccagccaagcaagcctcttaggctgggattgcagagagtgaacatcctttttcacctagacttagggaactgagtctcaaagatgcagaaacagcaatgaaagcagccatatcggttggttggcaagaataaggaacattatttccccccgattccaagaagaatggatggaacacaaagaaaccaggggtccctgctggggtctcatgcttcctggggacatcacctccctctctaaaaggctgaagccatcacacttaagttttcaacttccctcttccctctccatttcagagcctttttgtagcttcatcactcttccttccttaaatcatctttatctttctggtctctgagaagcaagtggcctgtgtcatgggcaactttcttaagtagatttcctctcatcgacatgatcatctctcttctctgtacattttcaagacttgtatatcccccaaaaagtaaaaacccaccttcaagactgctaccctgcgggtcaagccctcctacccttctcagactctcttgtgaatgacagctggtgataatacaaaataaatatttggtttctgtccccagttcctgacactcagctccccaaacccacagactttccagagtgatgaatgtattttgttcctttgtaagcaaattagatgattgttggcttggggtccctactagctccaagacagggctggtggccaggaaggccaagacattattagaatgttggaactttgagtcctaccccttaaccatccgggagggaagaggggctggaaactgagttaatcatcaatggccaattatttaattatgtcataaaattcctaaatggtggggtttggagagctttcaggttggtgaacacatcaaggtgctgggaggatggtgtgctcagagagggcagggaaactctgcacccctcccctcataccttacatctccttgccttccatctatttggttattcctgagtggtatcctttataataaactgctaatagtaagtaaagcacttatttaagctctgtgagctgtttgtctccaaatactgatcaacctttaaggagaaaccaatcttattcactctgctatgttgccatcacataacagagattttggaggaaattataaagatgatttttattgaaatcatctctcaaattggtgtgctctatttattatcaactcaactcccccatttaaaaaaaaatcatcattcactcacttatcttctctccagccatcacccttttgttctcctcttctttctattccaacttctcataatgttgcctactttctatctccagctcctaatttttcaagccattctcaatggcttctgtccccaccacttcctaaaacagcccttcctaaggtcatcaaaaaactatttgtcactataagcaataaactttttttaatcctcaattttacttaatttctcattggtatttgataatgttaatcacttctttcttctttcttcttgaaatgctgttttcacttcctggatatccctctggttccctggttcttctctggctccattgcaggatcatgctcctttattcaaccaatatttgttggatttcttcaagactggttctaggtcttctttactcactgtatcctctattccaaagcaccatcagccatgcctctggcttctattatcacctgttagtagatgactaacacatttacatctttagcctagacctgtcctccgagttccagtccattattttcatttacctgctggatctaccctcatggacatctcaaaatctcctgaggctcaatataagcaaaagcgaactcattgctgtgtcagtcaacatcttggcaggaagaaattgcacctcctattgaaaataagaatttgacaaaaaaatgttaataaaaggactttttgccaaggtgtggacatggttaaaataaaccaacaacgaacagtaagctggtgaaataaatactctgatatcaccctctctgccccgtgacctcctgaccattggcaaaaccaagccagacactagaaaatatggaagcttgttgaggcatagaggtcagccttctagggctcagatcagggtggaaagggaatggaactaaagggacaaatgaacaatattcagcatgatgattgtgttagtcccgtttgcattgctataaaggaatacctgatggataatttataaagagaggtttattttgctcacaattctgcagagtgtacaagaagcatggcaccaacatctgcttctggtgaggcctcaggaagcttttactcatggcagaagacaaaggggagccagtgtgtcacatggcgagagaggatcacatcgtgagagagggtgcaagagagaggccatcttcttttaaaacaattagctcttgcatgaactaatagaacaaaaatacactcattaccatggggaaggcacgaagctattcatgagggatctgatcccatgacccaaacacctcctgctacccactaggccccatttccaacatcagggcttacatttcaacatgagatttggaggggacaaacaaccaaaccatatcaaggatcttccaatcaaaacaagttttcttgcatcattccctacttggggaatggtaccaccatcatccagccaatcaaaccagaaacgtagaattttcttaatgtttgttctgccttttcctgcagacccatgccatcgaatgtcctagcagaactcctcagaacaatctggcttaaactatttcgacacaacctgcttcagatttacacatacctctcattcatagctcgcgttacaattgtaagttatgttgcatataggattactttactagcatcttgccttccctctaacctataaaattcatgttggcagagactatgattatttttgttcaccatgatttctccagtctcttgccacagtccctggcatggagtaggcaccgaataatatttgttatttgagaacatgttagagcttgtggggatatatagatcacacagtcacattctatcatgaggggagagcaggaatcataccgtcagaagagaaggttaagcaacttgtccaagaattcaaagtaaattattattttttaatggtagatttactattaaccaagtgttggatcctaagagttttacaaatgtatcgggagtaactctcaatgcacaaactcagacatatgggaaatacctattactatattttctttaagtccaataaaatataactttgaacctgctaagtaggctgcaagaaaattcagttatttcaggttccttccctggtctaagaattgcaacagaatcaagaaggtttgtgcaatatctagcaatgataggaagggcttctagtctccagttagttgtaaccctgctgaaatcataatgagtctatagtgatgtgttgagattagaggctcactgctgcaatactatctgtaggtttagtgcaggaatctgcatctcggctgaaagcctcagaacccagagtccagcttacctgagcatcctgaaaagaactcccattacttcccactgtcgagactttagaagaaactctgtgggtatgtgctcttaccccactctggcttcggtcctctctttttattgtaaaaacaaactgataatctctccctccctcccactttccctctctcctggtatccctcaaaaaggattccttaatggactttcatcaataagctcaggatttagtaaagcagaagctgggaagggaagtggtttacaggcaactcctgctataattgaaattctttttcaaagcaaagaaacatagaagacctgtttactttggtagaatggatgtgggggaggagaaaaccaacagaaaacaaaacataactgtatttctcaaaaagtttattaccacactaatatcatttcattaaacttcacagcaagcttgtgagcagttaattaatacagcctccaacttttagatgaaaaaaaaaactgaaacaaagaagctttgaataactttcccaaggtaactcaaccagtaggtgaccaagaaagatttaagttcaaactctgacttccctggagcttctgttctggctctggggaaatgaagaggaagacaataactggataaggctcgacatctatcatgacttgacggcatgagccaggaagcctgttattagatggaaaaaaaaaaacaggcttaatcgcttggaatacagaatgtaaaatgggatttccctggtgtagagaaaaggacaataggaagaagttggtttgagaagtagaaagtaaaaatctgaattatcaaaagaagaaatttagaaaggaagatgtccttggactcgaggctctgacttggattttccacctgtgagtcattcaacttgttccaaaggcaagacgtgtttttttttttagcaatagttttgagttgagattttttgtaatgaattccaaatgaaaacccttgtcctcttcgtgggacaatctcttggtttaatgccaaagatttactgtttgatggagaaaatgttgtcaaaatacggttcccattccatagtcatcagaaaacacatgggagggatatatacacttcctggacacacacacacacacacacacacacacacacacacacacaacacagacacatgaataactttcctaaataatttgatgatacatttggaattgatctcatgcatattaaaccctctgaaaagtccatgtctatgaagtgaagctttaaatagtaagctttgttgcctacaaaggtcaaatacaccctcttgtggtaaaatggcatattttatttccagatgatttctatcatagagctcacaacatggtagtttgaagaataatgagtacttgagaggaaacaatgaaacttataatgcttttatgctgtaatgtcaatgccatttttaaaaaaatattaattctatctgtcttatggactcccataagctctaattttcagatgaaaaaactgaggttccaaaagcttgtataacttgtccaaggcaagccagctaaggagtagaacagtgaagtaaaacaaagacattgaatgtcctctctattacaacaaacataccataataaaatggatccaactgattcccaaaagttatgagagttaattatgagagttaaggctgaaaaactaagactgcctgaaggtgaatgtaatcttgtaacagatgcatgcgtaacagattgtatcaatggtctaacagttaactgccataagcaggggaaggggtcagctacccaggcgcgggaggaccttcattttattatttggctttccacccaatacttgctgtccatcagccaatcacttgtgagtccaattcatcaatatgttttcagtgtctgatgtctgctaggctgtcctaggaactaatgatatagtaatcaccaagacagataagatccctggcctcacagagtttatattcaacctgggtatattggttttctgtcattgtacaacaaattattcgagtgttaaaacaacactcatttatagcatgcagtccccaaggtcaaaagatgagctggagtccctgcttaagaccaaaattaaggtgtttgccaagcactgctcctaccaggaggctcttgggggaagaatctgcttccaagttcattcaggtggttggcagaatttagctcctggtagttgtaggactcagttccccagtcgcatgttgtctgtctgtcggggcctctctcagctccttcaggctactcgcattcctcatcccatagttcctccctcttcaaaccagcaatgacacatccgttcctctcatgctttgacttcctctaacttcctcttctcgaccagctggagaaaatcctctgcttttaaagggctcctgtgattctgtaagacccacctggatcatctctttttttgccctataatataatcatgggaatgatatctaagcatattcccagctttcacccacactcaaagggaaggggagcatacactggtgaaggtccactgacagtcattcttagaaatctgcctctcacaatgggcaagacagtcatgaaaacaaaagcataatttttggttctgaagcctaagaaaggaaataggctgctataatagagagagctgaatagtgagaatgagctagctgcacagaaggaagagtgttccagaccaagagaagatcctgagatgaaataaaatttgggatgttctgggaatggagagagttcagcaagggagagagtggtgcaagataaggttggagagttgtgtccaaacaagctagtgtggagatttgcagaccttggtaaggagctgggattttatttttaacacacttaaaagtcaatgaagcatttaaaactcaggaagagtatgaactgatttgtatttttaaaagatattttttttttgagacagagtctcgctctgttgcccaggctggagtgcagtggcgtgatcttgactcactgcaacccccgcctcccagattcaagcaattctctgcctcagcctcccaagtagctgggattacaggcatccaccagcatgtctgactaatttttgtatttttagcagagacgaggtttcaccatctcgtccaggctgatcttgaactcctgacctcgtgatccacccacctcagcctcccgaagtcctgggattacaggtgtgaggcagtgcacccagccaagacaattttagatgctgggtaggaaggggattataagggaagagaagtagaatcatggtaagaagttggggtacttggtggatccaggacagagatgatggggctggggctattgtggaggcaacagagggggtgtaaggagggctcttccaaagatacatttgagagctttgactgacaggacttcctggtagactgttcatttctttgttatatatcatcacctagaattgagattttacacattttaataaaaacaaatgtaatgtcatttgcagcaaatatgtttatgcacctgggaagagcaagagacttgactgcaaccccaggaggagtgaacagaggtgtcaggggttggggagcagcactcagtgcagaggagaccccatcaggatgtgttggagaaagaacgcagcccgccagcctcaggcttccaaagcaggtattctggaaggccagtcagcaggaaggtgaaactccccaccccgggcagactccttcaaacagaaggtctctcttagcccacaggggaccacaggatctaacctagcaaaggagatttcgatataaaatttcctttcctgttggtctgtcctcaaagatttcacaaagattcacataaatgcttagggaatctatgaacaaaatctcaggattgtgtaggcaaagacctacatctctaagagtgaatggtgtaaatgaagacccatatgaggaatcgaagcaaattactttcttcaaagtagcctcagtgcaactaactcacacagagaaaactttttgaagaactttatattctcaaagatgtttaagaaaatgttacttcatttcaaaaaaaataaagcacaggccatcataaaatagaacaggcattcactcctacccttcattatgttatatatataaaatgtataacatgtataaatgcacacacatacatacacacatcaatgtggagccttctgtcctttctacagtctggaatcattcaaataaatataggcattatccattgtattatattgaactcagctgtaaaaccatttgagtctatttccttttttaaaataccagctctgtaattatcattttagtcctttctgtgtctgtcctggtttcttaactcttcctggatccatttcagaagtgaatattttaataggagcccttctgtgccctcaagatcttaaaatatattgccacatcgttgcacataatagtctctaatatttctttaaatctcttccatatttatacctcccttcttgttactaacatggcatggtgttgcttgtttgctttttatttcaccagaatcagcagagaaaaaactattttattagccctttgaagtaacaacttttggttgtatttatctcttcaactcttccttcattttctagtgaatcaatataagctgtttatcctccctaatacccacctcttgctttcctttgttttattttggatttttttttttaatttgtaagattatatactttcttcattagctcggtgtctttatttaaacttaaacataatgtcatgtaaaactatacaattttctatgtattttagtcatgacccacaggttttgctaatgaaatattttatttttattctttttgagaaaacctgttggccgggcgcggtggctcacgcctgtaatcccagcactttgggaagccgaggcgggtggatcacgaggtcaggagatcgagaccatcctggctaacacggtgaaaccccgtctctactaaaaatacaaaaaaaaaattagccgggctggtggcgggcgcctgtagtcccagctactcgggaggctgaggcaggagaatagcgtgaacccgggaggcggagcttgcagtgagcagagatcgcgccactgcactccagcctgggcgacagagtgagactccatctccaaaaaaaaaagaaaaaaaacttgttttttcaggtatgatctggtttaggggttatttgtgagagtgtgtttttaatttatgcaaaaatcgcttttggtccattttggtttcattgttcatttctagttttattgaattatgataaaagaatgcggtctataaactttgcacttttggtaaatcattaaagttttctttcggtcaagtacatcattgaacttttataagtgttccataagcataagaaaaaaaaataacctttttttgtcatagaaagacatgttgtctctatcagtgtgtttctgcaagcatgtgtgcactgaataacctaattttaattgtatattactttatagcttgggttgttcaaacactagataaatctacttatattttgctatttaatttgtccagtttgaaaggagtacaataaaatttccatttgcaaatgtccaaatttccatttttcatctggaaatttgcaatttccaaaatgcaattataataagaaataattgcatatttaaataaatctctctttggatttttagtaggtcttcagacattataatatttaataaatggtgctggcacgatttgctctccattctagacaaaaacaaagccagactcagcccatatgcagcaattaattgcatatgaattaaatatgtaaatgtaaaaataaaagcactagaagaagtctcagaagaatttagctctagcgatctttccaagcaagcctacagaagtcaagaatccataaagacactttctgccacataaaattattaactatttatatgacaaaaagttgcaaagtcgaaaggcaaatgtcaatgggtataatggcaaaggtttccagaaaaaatccccttgtgagcctaggcccttcctttatagcccatattgcaatgagactttctctccttcatcacatttaattgtttggaaacaatttgaattgtttcttaaattagttgaaacttgtaagacttacatatatatatatatagcaggcttgtataccagcagtccccaaccttcttggccccagggactggtttcatggaagataattcttccatgaacttgcggccagtagggggatagtttggggatgattcgagcacattacatttattatgcactttatttctattattattacattgtaatatataacaacataattatataactcatcataatgtagaatcagtgggaggcctgagcttgttttcctacaactaggtggtcccatctgggggtgatgggagacagtgacaaatcatcaggcattagattcttataagaagcatacaaccaagatcccttgcatgcacagttcacaatggggttcgcactcctatgagaatctagtggcaccactgatgtgacactaggcggagctcaggcagtaatgctcacttgtccaccactcacctcgcactgtgcagctcagtacctaacaggtcacagaccagtaccagtccgcagcccggggatcggggacccctgttgtataccttgattagcaacagtttgtacttatgtatacatgttgtgtttgaaacttaagacaggggttaccctttaccagatcatttcaaagaaccagtgggtgaactgggcctgggcagtcctgcctctgaaggcccagcagtctccgaagaatcccatgcaacttacaattagaaaagctaacaaaagtcagggtcccagagcccatctcaagagctgagagggacaacctaacacacaccaagttcttgctgatgacttatgtaccagctgagaattgctggaataattaataagggggaataaatagattctttggaatatacagactctgagaatcacattcaaggccctttccactgttagcatggtgagaagttgtaacactttactccgtgtacagttagggatcctctcctttccgctccattatgactaggaataagaaagatggcatagaagcctgctgtgttttttgtactcaggcttgtgagtctagtttctacatataaaagtcactcacaggaaaaaatagaatctgttcttagacattggaaatagacagtgcatcttcaatcaaactaacagaactagtaaaacactgacaattcaaatgacagacaaatgttgactctcccaaaatcaaaaaagggcctatagatcagaaaggagaagacaaggtaacagaaaaatgtgcaaagtctataacaagcaagctacagaacagaaaaatacaaatgaccaataggtatattaaaagattctcaccttactactgatcaagaaaacacaaataaagcaacaatatgttcccattttcccccctcaaaactggaataaattaaaagagtcatgggatctagtgctggagaaaatttcgatgggcattgttgtacattgttggtatgagtgtaaattagtacaacatccttgcaaaatattctggcaatacccattatatgttagaatatatagatgtttgtccccacaatctcacactgagagatctaatctataaaaataaaagcatcaatgagattagagttacagtgtcattaattacagcatcatcttttacaaacatcttggaaacaacctgagtgttattaattaggggactgcttaaatcaagcgtgattcagttgtactggggaatactattcaggcattaaaaagaaagagccagatctgtatctattggcccacaagattttccaacaatagttctttaataataataattaagtagaaaaaatactaaatagaataaaatagagaaagaaaagacaaatatataacaaaggtctaataactagcatatataaggaatttaaacaaatttcaagaaaaaaaaacccattaaaaagtgggcaaaggacacgaacatctacctttcaagtgaagacatacacgtagccaacaaacatatgaaaaaaaaagcttgatatcactgatcattaaagaaatgcaaatcaaaaccacaatgagataccatctcacaccagtcaaaacggctattattaaaaagtcaaaaaataacagatgctggcgaggttgtggagaaaaggaacacttatatactgttggtgggagtgtaaattagctcaaccattgtggaaagcagtatggcaatccctcaaagagctaaaaatggaaataccattcgacccaacaatcccaatactgggtatatacccagaggaatagaaatcattctaccataaacacacatgcacgtgaatgttcactgaaatgctattcacaatagcaaagacctggaatcaacctgaacacccatcagtgactgactggataaagaaaatttggtacatatgcaccatggaatactatgtagccattaaaaagaatgagatcatgtcttttgcaggaagatggatggagctggagacaattatccttagcaaactaacacaggaatagagaaacaaataccacatgttctcacttataaatgggagctaaatgatgagaattcacaaatgcaaagaagggaacaacagacacagggtctacttgaggattgagggtgggaagagggagaggagcagaaaaaaaaaaactattggttactacgtacctaggtacctagggtgatgaaatagtctgtataacaaactcccattacacaaatttacctatataataaacatccacatgtacccctgaacctaaaataaaagctaaagagaaaaggaaagaaaagacacatatataacatttagaaaaataaaggagctataacaatataggaagaagaataagcttatgagtatactatatgcatgtatgtgtacacatatacaaaatagtaagcacacatatacactacttgaaaacctgattactacaaaagtttaaacatacagcttcattcttttcagtggtagaaaacctgaataaacaaatatatatgcaagtacctgaaaaaaagttgttcaatataactcttaaaatatactggatcagatggattgaacaaactttgaaaaacagattacatctctgctctataaatcgtggtggagcagggtgggggaaatcccattgtaggaagctagcatgactctgagaaaaaatctagcaaaaagcacaaaatataaaaactaggtaacctgcctagatgccaatatggcaggattataaaagcttgtagcacaacatttggttaagtaacacaaagtcaaaatatgcggctgggcatggtggctcacacctgtaatcccagcactttgggaggctgaggtgggtggatcacttgaggtcaggagttggagactagcctggccaacatggtgaaaccccgtctctactaaaaatacaaaaattagcagggcatgctggcacatgcctgtaatcccagctacttgggaggctgaggcaggagaattgcttgaacccaggaggcggaggttgcagtgagccaagattgtgccattgcactccagcttgggtgaagaagcgagactccatctcaaaaaaaaaaaaatcaaaatatgtataagcataccatagctatctatatgaaggtaattatgcaaatatttcaatttttaaacttccaaaagttaatccactactgattaaaatccaagaggttttttgttgttattgtcagggagtttttcaagagagtgggaggaagcaaggatcatcactaaaattcttaaattcaccggaagaagaaatatgtaggagaaatagatgagaacttaaaaatatatttaaggaataatagcaaaagggacatattccaccagaaagccacatgtacttaaaataattaaaatcaatgtagtctcagtacaggattggacagacaggtaaagaatgagaatagaaaatccagaatggcacaagatgaaaaaattgagtaagtgatacacgaaaattttcagctctccatagaaagaatacatgtttcagaaatgttattttaaaacgtggttagctgtttggaaaaagattctattcaacccagaattctaatttaattcattggtaatcaaagaaatgcaaagaaaatcaaggtattctagtttctttgcttattatgtcaggaaagatacaaatattgtggtcaaaaggatgttcccagtggggtgcagtggcacacacctgcacctgcagtcccagagagtggggaggctgaagtgagaggatctcttgaacccaggagtttgagcctgggcaacttagtgagaccttatctcaaaaaaaaaaaaaaaaaaaaatatgctccctgtgttagtgggattaaaaatgcgcacagactttctgctgtgccatgtgaccacatttaacactgaaactgacacaataattccactttgaagaatttattaagaaatagatgacaacggacaacctgtaataacattgaagcgctacagaaaatagattttcctactaaaataaaatattattaaatgaacccaagaagagtgaaaaaactggaacagaatttgtaccagagaacacattggagaggtcatcattgagcgactgctgaaaaaaaaaagaaccagcttcaaatgattttacagctcagttcactatatctttaagaaataggtaataccaggagatagagaccatcctggctaacacggtgaaactccgtctctactaaaaatacaaaaaaaaaattaggcgggcgtggtggcgggtgcctgtagtcccagctactcgggaggctgaggcaggagaatggcgtgaacccaggaggcggagcttgcagtgagccgagatcgcgccactgcactttagcctgggcgacagaacgagattctgcttcaaaaaaaagaaagacagacagacagacagaaagaaagaaagacagacagacagacaaagaaaaaagaaagaaagaaagaaagaaagaaagaaagaaagaaagaaagaaagaaagaaagaaagaaagaaagaaaagaaagaaagagaaagaaagaaagaatacctatgaataggtgaacaattccagagtgcagaaaaaagagaactcacctcagtgaattttacagagatgggcaaaagtcgagtccctgcaatggcagcaaatctggatctctatctccatcccaaagtggggggctcccctccgtactgcaatgtcccttgccctaccccagggcacagagctttctcccatcccagagtccagccttcggaaaacaagacctggaaggatccctttgatccctgggattagtaaattttcaaaggaaactcccagctcttggagctgagctaaaggccatggagcaagaattaagtgcaaattttcttacctcattatcctgccaaattatgtatacattaatttcaaaagaatttttcacaaatattttcagaagtaacctttagtttcttgaatttttttattaattataatttcttctttatcattgtacatactgtttgaagctctgaacaataaacatattcttttatgataaaaaacaaaagctattttcatggtaaaaaaatgggaatttatattaatagatcaacttagagaaaagctgacatctttacaatattaagtcttcctgtataggataataggtaggaattaaacttatctatgtaaagccctatttagtgtatctcagataccttttgtagttttcttcacatagttttagatatttaatatatttggttgattttgttaattataactttttcattttaacttgcaactggttgttgctggtatacagtaaaaggattgaattcaatgcatttctagaagactagctctctagagggaacctgacatactagttttgtaattagcatcgatgcctttagtgtcttgcctttgaaaatgatgtttgtggctatttatttatttatttatttagacagagtgttgctctgtcaccaggctggagtgcagtggcatgatctcggctcactgcgacctctgcctcccaggtacaagcaattccccctgcttcagcctcccaagtagctgggactacaggcgcgtgccaccacgcctggctaacttttttttttttctttttttttttttggtattttagtagagatggagtttcaccatgttggccaggatggtcttgatctcccgacctcgtgatccacctgcctcggccttccaaagtgctgggattacaggggtgagccaccacacctggcctcgatgtttgtggtttatttcagaaagatgtccttttcttggtcaggaagtatattgtggttgctaattatcaatttttttctagaaattgttcaaaaatattttagtatatacgaggaatgtcttatggtctttttttttcaaactgttaaagcagtcattattattaatctatttttaagactgaaccatttctgggtttctgaaaaaacaaacaaacaaaaaccctacctcttcaaggtagagtattcttttatcatgctgattctattgccaacatttttcttaaggtttggccttggtatttatttaaaaatgactttcgtctgtagctttctgtttttatgggatacatttgtcagggtttcttagctatgctctgctaacttcatagaatgaattgcaaagttttccatattttccatgcttttaaatgcctaaatggtataaaaactgtttcgaaaagaactaatagcctttgagtctcagtattgttccagcatattacaatgaatattgtagattagttttataatctaacagaatgagtgctttaaaatacaaaacattgcaggactagaatacctaaagacaagatgaaatgtaatgaaaaattaaatgaaaagtgagttttagaaatcatctgtatggaataatccccaatagctataaacacatgtattcaaatgagctggaaagaaatataataaaaggttcacagcggttacttctggaagacagaatgactggggatttttatttcctcttttgagttttcctacattacactctttccaccattcacatgtgacatttttgcaattagaaatttattaattaatgacttgttaaagatgctgagctcttcaaagtaagagctgaggctcgtgaacatcaatgatacttacaaacacttctatgcagctgaatgccaaagaagacgcacattaaataaggacatggattgtgttcattgtctcagaaactcgcatctattgcagggtgatgaaggtttgtctagaaaggttcaactatgccttttctctcccacccactgatgatatccaacaggaaattaaaaaggggtgggaggcaagggttgaatgttttacaagcattgtgggcagtcctctggacaagaagggtctccccattgccactgagtgcggtcaccagccagcaaagtgctccagcacctctaattaactcattctgcagaaatttggaagaaaaagtcagcaattttagaaaggtgctgactcaatattttactacagctgtaccatgatgttgatcaaatggtatcagtcactcaatgtagaagtgaaataacagatttttcaaagaggtattgagagcagatttcctcaccttgtgatttaatctgacccagatacccacagttggctttattcacagtttagccactgtgttcttctggcttctctttacgcgaaatgtacggagcttcccagtctcaacccaggacctctcccagacagcacttccattgagccgcccgctgcagagatagctcctgagataacgcagggagaaaagactgcccattcgtctcttttaggttgtttctttctgatatccaaacatcattaacgcagtgaaaaattcagtcaaaccagctgcgtggcttcatgtcgacgcagaagtaaactcattttcctgagagccagagggggccgtgtttgtccacttacacacacacactccagctgtgcccacctctggcttctgtgtcaatggaaatcatttgttcaatttgctgccctagtgctgagttatcttaatgcctgaaaatgcagatgagaatcgctggtattcccatagcacccctggccttgccctggctgttttctccgtgaagaatgaatgttcctgccccctgactcgttacttcctttttttctttctctctctctctctgcttttccattggggagtctggtaaattcctaaactcaattcaagagtcatttcctttccaaggctgtcccgaatctatccctaggtgttctatccttttgttactatttatctatttgtacaagcacatttgtcccccacaatagaccatgagttcttgaaagactaacagtggcaaccaggggccacattcagtgctttctattgcactaaccactgtgctaagcccttgatgtttcttacacttattatacaatattgatgattgctaatattttcattctttatgtaactctgcatgcattaaacttaaaatatttatataaattcttacagtagtctatagctagattctatcattattcccattatatagatgcatacactgagctttaaagaaattcattcatttgcccaaagtcactggctagttggtggtaagcagtagcataagcactgactacgactcaatgctggcagtcaacttcacagtcttaatcatctttatagccccaggacctagcagtctgcctaaaacatagaagctgtctaagatatatttatggaacccatatatgactcacttaacaaaacaagacaaagaccacctggataaggaagcagaaaagcttcaggaaacttcagtttcaatgatacattctggtgacttccctgaccaccctcttattggcttctgtaacagcctggagatcactcaccacatcctgtacaatcccgtatttatttatctgcctgctcattagttcaactgtctgcctccactagttgatcataaagtccataaggagctttgtaaccacagcatccctggtgcctgggatgctttctctcactcaataaaaactaagtgaggctggccctggtggcacacgactgtaatcccagcactctgggaggccgagatgggcggatcacctgaggtcaggagtttgagaccagcctggccaacatggggaaacccctgtctctactaaaaataccaaaaattagccaggcgtagtgatgggtgcctgtaatcccagctactcaggaggctgagacaggagaattgtttgaacacgggaggtggaggttgcagtgagccgagatcgcgccactgcactccagcccggacaacaagaacgaaactacatctcaaaaactaagtgaatgaatgaaggcatgaatgaaatgcagctcctgctcacctctctatacagtgtttttgaaatgaataatgccaaaagctctccctagtgttctgtgactcaacaacattcactcaggccgggtgcagtggctcacgcctgtaatcccagcactttgggaggccgaggcgggcagatcacaaggtcaggagttcgagaccagcctggccaacacatagtgaaaccccatctctactaaaaatacaaaaaattagccgggtatggtggcaacgcctgtaatcccagctactccagaggctgaggcaggagaatggcttgaacccaggaggcggaggttgcaatgagccgagatcgcgccattgcacaccagcctgggcgacacagcgagactccgtctcaaaaaaaagaaaaaacaacattcactcactaaacatgatctgtgtttttggttttttttttccttgcttctccctactacaggacaattaaatgagcatgcgctgtggttagatgccacaattgagaaattaactctgactggttttctcaggagtaaaccagtaaattccacaaaagagtaagcctcctgcaagctttgtcctccccaagggccttgagtcctggaggtctggtttgatttgactttttgacttttgacacttatttatcctcaagtatcctgaagcaataaccttttacaattttcttttcctttcctaccaccacaatattggttcagatccttgccttacattaaggctgtgtaaataaccttgccataaatcagaggacttcagataggaggggaatttgatagtcgatcaatatcacaccccttctcctcacctcttctgagaaaaccacgaagcccagagctataaagtgacttagatgatgacaccagagggacaagtagaacccaggctcctggccttctggcctgtgtcctgtttccacaccctgcctttcattttgaggcttaatctctcatctcttaaggccacttcatagtctgtctcttttctatgttaataagcagaactaggcttgctcaagaatataggaaattgcacatttataagacatcagattgattgtgagctgtgcaaagcaaaaagattacatttcctataaatctgtttccactcagtcccggccaggccaagccagcagctcacattttgtggccattcccaccgccctgtggcggaggcctggtactgcacacatggcatgaaacaacccccaacaagcagcaggctgcaactggcttgaaggtatttatgcaagtcgatcttgacccacgtttttttctatgtccatgaatggagccatatcggcctgacttgagcattattgttgctgagatacaagaaggtcacagaggaagtagaagaggtaaatccctctaaaattcatgacttttatttcatgaggatcataaaaggccattgagaaccatcctaagaacctgctcattataaatcacgctctttagaaactactttggaatctctgcatccctacacctgtctctgagctccacatgtggaatctccccagaccccatgaccttcatacacatttcaccatttcccagagccagatttttatcacacaaccagaatcccgattgtcagttgcattaacaacagatcaaaaagatgttttttaaaaaaaaacccatattggttcatagtctcagaggtaacactgatatacacaggcctatgtgattgtttatagtggctctggtaccatctagaatttcaggaaatttaatttatagatattgtagaaatatagaagatgaaaacatacctttcatgaatgtcaccccctttcaagttgtgaactaattattacaatatatgagtatatgtcataggcagagcatctatgaatagatttaaaagtcacccccaaatcataccagttcatctgcatttactgatatatacagtgctcattaggaatggcctgtggttcatgtgaatggatacaagaactcataactgaggacggcttcttccagaagaatcaagagtggctgaaaaagtaagaccatttgttatttcaaacaacaagaggtccagaagcagtatgttttcaaaattagctcaacactgtcattaaggacccaagttctttttctttttctaccccagcccccatactcaaggtattagcttgaccctcatgatcatgtagacacagcaaggccctgttgaaaagagggacatttgcacctctgtgtctcttttattagaagagaatacctttcccaaaagtctccagcagactcatcctgggttcccattggccaggattggtcacatgctgtgtcttagctgcaagagaagttggaaaagtactccacaggtatccctattgtaggaggtgggtcctgccaatgaatagggggatgagttgttaaatgactgtagagtagaccactaattacactaccaataagtgttaccttttcatagcccaaccaagtagttacagattgtctcttttctttttattctcaagtgatcagtattgcaatttgaactctttccctgtaagcatcatctttctattgcatggaatacttttctctctgtacatacacatacatatacacacatacacatacacagtgcatatatgcacatatatacacatacatatacacatacacatatacacatgtgtacacacatatactcacaaaaacacatacatgtacatacatatacatatacacccatacacatacatacccatacacacatacatatacatacatgcatacctacatacatatacacatgtgcacaaacatacacagtacacgcatacatgtacacatatacacatgtacacatatatgcatatacatgtgcatatacacacacatggcttcactgcattcattcagcaagcaaatacatattatgtctattaggagccagacatattgctagatgctgaggatacaatagtaaatcgggtgggcatggtttccaccctcacagaacttatgtccaggaaggagagatacccaggtcgtaggtaatggcaggctgtgatggagcgatgaggaataagatggatggggagtggcctcatgtagagtactgaaaggccaggtgggcagccagggggtcaattccttccacccctccttggcctgagacagggcacacgtagtgtccaccttccctaccccaggcagtggggaagctctgtggctctgagcactcggcagttggccaacctggggagtgcagatgagagccaggaagctttgggtgaccttaggagcagcaggagggacagagatcgacaagcaaatttgggaggtagaagagatgagaagaagttagagggcaagaggggagacgagtaagtagaccgagaagaaggagactttgtaagaagggcagtgtttccaaaataccttgacactgggatttgacagcacaggaggggatgagccagaagtgggtgacagagtagcctgcccatcctgggactgggcctgaagacagctaggtatggccttggtcttctgttccaaatagttcccccaaacaggcaacctcctagcagcagccaacacctcttttcccttgggatttgagggaacaagcgctcacttgttgtacccaaggccccttcaaccacagataacatacaaggagcacatgaggttgagctttaagaatggctgtaagcactgacaaggaatcattttaggagcagggtaagaaggcctttttcccaaagcatgccttctcttcagcttgcagcccactgaaattgttcagatcaagtcatggcttttcattacttaaagaaaaataaaagaattcaagattctgaggtctgaacaagatccttttgagattacctccagataatcttgggcctgggggactggaccaggagaaggttgtagggatgggaaggagtagcctggagccattggaccagaagagtgcagagctggagacagggagacctgagaaggagctttccaaaacagaaatgttaaaatcttagccatcggtagaaccaactccaccatcaacaggtaatgttccataaaaagaagagttcagttctaagcccacagggctgaagccaagaacatcagcccagaaccaaggggagggaacagagcttagagtatgtggatttcatatttaaaccggatactcatccacagcaaaatcccagaaacccagatgctgggaatcatgaagcgcatcaattgccaattgttgtcttggtttcactgagattttacgttgggtaagttatctaatttctctgactctcagtttcttctttctttctttccttcctttctttctttccttcctttctttatttctttctctctctctctctttcttttttttttttgagacagagtctcgctctctcgccccggctggagtgcagtggtgcgatctcggctcactgcaagctccacctcccaggttcacgccattctcctgcctcagcctcttgagtagctgcgactacaggcgcccgccaccacgcctggctaatttttttttttttgtatttttagtagagacggggtttcaccatgttagccaggatggtctcgatctcctgaccttgtgatccgcctgcctgggcctcccaaagtgctaggattacaggcgtgaaccaccgcgcccagcccagtttcttctttaaaatggggccgtggacattcacctagtgagatgaaggcgttacaggtatgcaggttgtggggttgctggatgttgtagccacttctttgagaaatactaaagttttccagaccgaggaaaaggttatctatttgtctacagctctggagcttttggctagtgcttctgggttcaaaatctcttagctgtgtctccgcttaaggataactctcctgggattctttataattccatgaggttgctcgcctcacacttgtcagcaatctcgctacctcaatgagcagtttcttctgtgaaaaagaaatgaggttttcaaatccacctgaacaggaaaaggggcagcccagacccccagggaatcgcctaattggcagctcagcccctacccccaagtccccacaggcccgcagcccatctgctcctgaaccgactccagtccctggacttcttcccaggtcctaaactacttaaaaactccttagacagaatgtttcttttaaaacagattatcatccatttctcccccacactcccccatgaaagggctcccgagttttgattgtttttttctttttatgatgaatgaattctatcgtgtgtgtgtgttttttttttgatgaatgaattctatcatgtgtgtgtgtgtataatgtataatgtattgacatagagggatctccctagttttctcataaatgaattatataatgtagttatatataactggaaaatgtataattatacaatatatgtagttataattagctatatgcctcctcacaagaatgagagctctttgaggacaaggatgtgttttctccatctctctgtttctatagctaagttttaaaatacatgcaaattaaatgaatgaacctgtcacaaacttgttgtgaaaatgaatatctattataaattttttaaaaggacatttaaatagttttaaagtaataaagccatcagttttctataacaaatcaggaaagaaatgatttctaatcttcatgttatttctagcagatcacaaagttcagacccataaagaaaaagatgaataaatgtgaacacagaaaagtctttaaatattcgtattatcggaaaatgaaattataaacaaaatcaaaagtaaacaacaaactgaacaaaaacaagaccaatacacaggaggggcagatggtaattcccttcatttgcaaagcatttatacaaatcaatataacaaggtgaacaagcaaatggaataatgagcatgggacacagcagcttacagaaaagaagaaatacagtggccatgaatgatcttaaaatgagctaactcattcttaatcagtgaattgaaaatacaactacatacaattttcagcattcacattggcattttaaaattttgctaatacgccatgtgaattagattgtgataaaagaagtactctcacacgtatacctgcacaacttccagagggaaatgcagctgtttcaatctgtgtttaaaatgcacataccctttggtccagaatcttactggtagaaatagtcattatggatatggttttttaataccatcaaatataaaatacacaaaagattcttcttgcaagcattgtttataagcaatgaaaggcttaattgtttgctttttcatagcttatgttgagctaatgagtttcataaaattaaaccgaattgtaggagtgttctgtgctggaaaacttggtaactggcacataggttcatcacaaaattaacactttgttacttaagaaatagctatatattgggagtccgaggtgtgtagatcacctgaggtcaggagttcaagaccagcctaaccaacatggtgaaacaccgtctctactaaaaataccaaaaaaaaaaaaaaaaaaattagcccagtgtgatggcatttgcctatagtctcagctactcagaaggctgaggcaggagaatcccttgaacccaggaggcagaggttgcagtgagccgagattgtgccattgtactccagcctagatgacaagagcaagactccatctcaaaaaaaaaaaaaaaaagaaaaagaaaaagaaacagctatatagatgagaaagcggtaatttaatcaccataaaaagtgaaaactactaaaattctgaaaaatctgccctcaccattgccctttatgaattacaagctctttattttagccacagatgactctacacccttccaggaacactccagcactttcatttcataaactcacccatttgttcttgctgttcccctgttcaaatgcccttcctccctctccctatcacactccagtttgtctgctaattgaaatccaacactgttcttcaaagaacaactcacatgccacccctttcttggggatcaagccttcacaatatttgacaggcagttctctatcagactcatttaactctgcctcagactacagttaattgactggcagtggttgacagcactgtccgtgtcttctggaattctccataggatcccgcacagttctgcacagactggatactcagtaaatgaaaaatcactgtgcttctccctgaacacagaaaaggagtaaaagaaataaaaatggggagattggtacaactggtttggtggcagaagcaagaataataatgcctgtcaaaaccagcaactcagcccttttgagggaggcggggaagccctgatttgtagcatttactgatctccttggtgtaaatactccccatatcatggctgatttccgattaccaacatgcagacacagaactcagagttgggaagagatgcatgcaattggctctcttgagccaagctgatctagtgcagcagtgttctggtccccaggttgaaagttacatcagttatttgcatagtgcaacacatgttcataccaatgaatcttaactttcaatcaaataataaggtaagtttattgacatacattttacatcttcttattttggagaattcaggacacactacccgcaaaatatggcaccttgacatcttgaatattttcagataaaggaactcaagaaaactgcacaagtaggaaggtcactgtgaccctcacgcagcctttctcccctgaagtaggtcataaaacctccaaaggattttctgactctccccagaagcaggtcacaagaccctcatgtgagaggtgccctccctatacctggaggacaggagcgtccttctctctgaagacacgaaaacagagagaatctgcacaagcaggtcttggtaagttcctgcctgtttattacacttagctcactcccctttgtccacaactttccactcttcatcaaacccactataaaaaaatgctcaggttcaactgtttctttgagttttcaattacttttgaaggcacctgagtgatataaaatttatattaaataatgtgtatgcttttctcttagcaaactgtcttttattataggggcctgagctaatgaccttagcatggtagaaagaaaattactttcctcccctacactatataatttaaacaaagtatttttgtcagatctttttcttcactaagtgtctaacttcttcccatttctggaactgctctgaaactctcccattcacaatcatgtggctgagaagaaccaagagacagaaaggcatgatagaaacaaaacacctagtgtggccgggtgtggtggctcatgcctataatcccagcattttgggaagccaaggtgggccaatcgcttgagttcaggagttcaagaccagcctgggaaacatggcaaaactctgtctctatcaaaaatacaaaaaaattagccaggtgtggtggcacgagcctgtagtcccagttactttggaggctgaggtgagaggatcacttgagcctgggaagcagaggtggcagtaagccgagattgtgccacagcactccagcctgggtgacagagtaagaccctatctccaaacaaataaaccaaaaaaacaaccacttagtgtttattaacatatagttccatgcagctatatgctgcactctacttttcctttgcttcctctcctcctgggtttgaggcagaaggcaagctggggaagaaggcagaagaaaggaaatatagaggagacaaatacacctagagtgggctcacaaggcggtaatctatacacctagagtgggcttgtaaggctgtaatctatacacctagagtgggctcccaaggctgtaatctatacacctagagtgggcttataaggctctaatctctctctgtcatttccttgctgacgctgaactgtgtgtttcatgtgactagagatgaaacaggaaagggaatgcgttggagccattttttaaaactacaaactgtttctcactaccctctgggtaagtagaatgttcttaattccactcatgttacctacaatggccgttctcttacagacatcatgtttttagcacgttattcctagcaaaatccccaaggagtgtaatagtaggttgcctaattcattctgtttgagcattatgaactcagaatcaatatttgaatttttagagcttcctgttttcagagtcctgtgttccaggcatctgataagaatgactgcataattgtcctaacttctgtaatacttttgctcgagtatgatctcggtatacagacttaatgcttatgacaggtccacattatttgagtaaaccgattgaaaaccaagagctgattgagaacgtcccttaatctagcggctgcattatcaatttgtgagcatgtccacattctggtctttgagggagaaaatacagtaaaaaaaaaaaaaaaaaaaaatgaggtcaagctgggattttctagctcagtgattggctctaaatgaaggcatatgaatctttgcctttcggttgtgtggaaaatctgccaggggctaaactttgttgttagattggcctaagcaagcaagacaagctagctgggatgggaaggagagggaaggaagaaagagaagaaaaacgtggcttcctgtggttttacaagggtcacatcagcctcaggaagtagggacattgcgagcaactaaacatatgcaaatgaaatgcaacttttcagagggaatttgttaagttacttcattagcactgaggccaagggcagtccagagctaatgcaaagtagatctgacggtttccctttgtttgcgtcgaggtcttcagggcagtgggagtaaaggggtgaaaaggcggacagccatgtccttgaaagggagcagaacctgtaaggtctcccaagcccttttggcttgaatgctggcttttgtctcccgagggccattgctctgctccccgagagtccaagtaatgaagcacttgattaagacctcattaaaagttcattgacattcatgactggagccatcactgcagcccagagagatggagggaggatggggccagcctagaagcataaaacctgggtttaaatactctttctgccacttcacagcttggttttcttcctggtacatttttaatctctcggtaatgccacttttctcatctctaaataactccagttctgtgccactgtgagaacgcgctttgaaagccttagtattttgtgtgtccttattctttttttttttttttttttttttttttgagacagagtctcgctctgtcacccaggctgcagtgcagtggcgcaatctcggctcacggcaagctccacctaccgggttcatgccatttcctgcctcagcctccgaagtagctgggactacaggcgcccgccaccacgcccggctaattttttttctattttttttttttttttagtagagacggggtttcaccgttagccaggatggtctcaatctcctgacctcgtgatccgcccacctcggcctcccaaagtgctgggattacaggcgtgagccaccacgtccggcctgtgtgtccttattcttgttttccacccctttgctgtcttcatctggttgtttcaggctctttaggacctgctgaggacatgtatttcttgcatcacagcgctgtgaagcaccctgagactgcacaggcctctgagaaatacagacaggttatagggaaaaacaagaagctctagcctctggcagatgtccatgcaacccacccaagccccacaaaggaaacagtgcaagcagctgagaatatctctagactgttgatcagaccttgcccaaccgacattcacaggcatacagatagccaggtgtgcccctttgcacaaattcgagtccttccatgagatccaggaaccaagcacagcagcaaatcctaaagtgttccacaaaacactcattcttccagactgttggcgttctaccattgacggagggtggagctgaaaattctgggcagctttcctccaacgagcccaagaatctgaaaggccaccctgacacccacgtactactcaccagacacagccagcgtcactggacagccacaagttttgtttttgtttggtttttgaattcagagcttctgtttgaggcttagagtttccaagatggagcagggacccctcttaggggcctacggggccccctaagcataaaggaaaatcttgagttccttccaaagaaattccaggtacctaactagccctaagaagtaaatgaacaacttgataagcaagaaagtaacagtggtctacaacaatagccaagtaagtgagagccttgagtgatggtatgtttgattccctatagaaactaaagataacatcttaacatatatccgtgaattgttttccagaagccctgaccccgaccaaaggttcccctggcacatccacctgagataaagagctgaggactgaattctgatgaccattctttgttctaaattccttcctcagaggcctggagcaagtcacatccccaggccagaccttaacattccttcctgctaaccccaagtttttagacaaagcttcacttccttaaccagtcaggaatcagagtcttcctcccgctgcagagaaccttggtgtgaaagttctgctttattgtgccgggtgagcggaccccaggttagttcggtgacagaactgaacatccacaagttttgttttggtttggtttggtttgggggctttcaccttctctttgaggcttgtactttccaaggccataccctaggaagccagaaaatgactccatccactccagaccctccttcaggttctctgaagattctataagaatttccattctcctaacatcacctccaacctcaagtaacctctcattcttccttttttgcctagagttggtatcttcccttgttctgggcaagggaaagaatcttttcctcccaatattattgaggtataattgacaaatagaaattgtatatatttatggtgtggcacgtgatgaaatacgtatacattgtaaaatggctaccacaatcaaggtaatttacacatccatagccttacatagttactgtgtgtgtatgtgtgtgtctgtgtgtgtgtgtgtctctgtgtgtgtgtgttaaaaacacttaagataactctgtaaatttgaagtctgtaatacttgaaattctgggctattgttgtcatgctgttagttagagttccagaagttatttatcttataccagaaagtttatatccttcttactttatcaaagattcttatttcatcccaaattcttcctatgctctggtagatggtataaacttcatatctgattcctccacttaaagccaagtttctgaaatagtgaagcttttttatctcttgcagaatagccatacctttttaaattttggttatagatttataaagctctgcttcagagctcaaaaatcattggagcaagtttttgttctcgctgatttttccctagccagaggcaatatttatagagcctcccaatggctacgtggctgtttaggggtgacgatagtggcagtagctggtgacaaagatttttggcttggccaaactttagtcaggctcctgaaccttcttcgagggccatctgtgtacttccatgtaagattcagtcatggcaaagaactctgctaagtcagtttaacaagaagccctcatcctcaatatctgatcaccctcaatatctgatcagattcctcatcctccactaacacctaggtgatatcaggtcaccttggtctgtgttgagcaaaaatgctcttagtttagtttgtccagaatcccccttccccctgatgttcctattagtaactttctttcttttttttttttctgagacggagtcttgctctggagtgcagtggcccgatctcagctcactgcaagctccacctcccaggtccacgccattctcctgcctcagcctcctgagtagctgggaccacaggcgcctgccaccacgcccggccaatttttttgtatttttagtagagacggggtttcaccgtgttagccaggatggtctcgatctcctgacctcatgatccgcccacctcggcctcccaaagtgctggaattacaggcgtgagccaccgcgcccgacctcctcttagtaactttctacccactgactctactccttggctgtaaatcccacttgcccatgctgtatttggagttgagcccactttctctccaccactgcaaaattccactgttgtggtccctatttctattgcaatgttcctgaataaagccttccttgctgtgcttttacagtattattgagtaatctggttttcttttatactggagaaagagggattagaggtaagtggaattggtatctattggttaaagccaagaaattaacactgttcattcttctcctcccaaattcaaaatgaaaagaaaaaaaagacataagtgtcaaatggagataaatattagcttgattattgataaaagtgggattgaatgacagagcctagaggtacaaccacatggacttgctaattctttgccctggggatcaagcattttctcctctggtcaccggtccagcctgaagcctatgggccttcccaggtgcaatgctccatggagaagcaaaggaaacttacaccctgaggagaggccagttccaaaagagatccagcaggcctggcatccactttgacacttaccagttaagcatgtcatcagggagagaaggtaaaataagggtctaaggaaaaccaaacagagattgttagcagaggttgggaagggtagcagggagcaggagataaagtcaggatggttaatgggtacaaaaacacagacacaatgaataaaatctagaatttggtagcacaataggattactgtagttatcgataatttatcctatattttcaaataccttaaagagtggaattggaatgatcctaacccaagataaaggtttgaggtgatggataccccaatttccttgatgtgatgattacttattgcatgcctgtatcaaaacatcttatgtaccccgtaaatatatataactattatgtacctataacaattagttttaaaaagaaaatgaaatggaattggaaacacatcccatttaatacaaaatcattacttactaatattattataataaaattctgacttctgttggctagtattttgtttcaataattttggatctatattcacagcttagattgttctccatgcgtgtactttgtgctatgcttttccagttttattcaggtattgtggtttcatggagtgccatatgactctggtttactcctgcagacctcctccccctacctttctgccctaagaggctgactgccgtgaaccacattgaaactagtgtcccaaagagttaaagacacagaagattaacagaaattcttgagtttgcaggacagcagataagaaaaaaaaaaaaaacttgctgaaatgttgaaactccttgcttatgagataacaaaactggctgaaattggccggaaccaatatggctgactggagtctgtgcagaacaagcttgctgacctcacagcctaagtttccactgaatgtttcatattaacgccccctgaatttgcacatgtgacccatgaggaggcatgaagggataactgtgcgtacctaatgacataccagacctcccctttccttccaccaatcacctgctaatcccagaatccacccattaaaccttggctaataaaagtactgccataaagccagcataggaagacagatttgagctggactgctgtctccttgttggtctacctacaataaaatgcttttcttgtctcaaaaccccagtgtcatagcactggcttctagtgcatagggcaatgagctctttagcttggtaaccacatcggtgactcccttgacctgtggcttctggttggctttgaccaatgagaaactcaggaagaaaatttcagggtggaaggagaatgagactggagcatttattctcccatccccttctttgcaaggtcaacagaagctgtctgagtcccaggaacaaatatcgcagctgctgtcgggccttccttccaggttctgaaggaaactttcccctaccccttcaagccttgggttggtaataggactgcactacccagctggcatttccacacccttcccataccgttattgcctaatgtgagtgtgacatctgttgcctgctgggaagctgactgacacacgtggttaagctgacttaacaaaatgagctggaaagcttgctatttttatctatgctctggagcacattaactattgcaagaattttctattccttgaaggtcaaagaactgatctctaattccctcttagcctagtattttaggaataagatggttctctgacaaatgtttaaaatttttctcatggtgtttttttttaatttaggtttcttcttcctcagtcaagtttagtaactaatatttcctttaaaaatcacccatttccttaaaagctttatattttttagcatggaactatttgcagaattctcttttactgttttcatccattcagaagaacttccagattaataaaaactttgcatgacactcagaaactttgtaagtaaataaaaagaaaaactagttttgttcttatgcaattgatccatgaagcataatatttttttgttatacttggccacccagaaactatgtactactctcttaaatttggggacaactgcatcatttaatctgcattcccctaggtagaagtcagaaattcactctcccagactcccatgtagctagggcatagatacgtgacttaagcttcaccaatacgatttatttacaagagactttgggacttcatgatgcaaagtctcaggcaccaattgagagcaatttctggtgcaggtactgaacacaacatctaactttcagaggctacattggctttaaaggttgtatccaatgtccagatttaagtaacaagttgaggtctctatgcttagttgtggtagtaacagcgtctccatggaaactctcagatggcttaaactggtagttgtaactgtctccatagccttattctctggcccccttggagaatgggtgaggtacctgattgttatgggctaactgtgtacctcccaaaattcatgctgaagccctaaaccccagtatctcagaatgtgattatatttggtgccaaggactttaaagaagtcattaaggtaaaatgaggctgttaggatagggacctactccaacctgactggtgtccttgtaaaaagagaaagagacaccagggatgcccacacacagagaaaaggccatgtgagaataaagcaagaaggtagccttctgcaagccaagaagagatgccaaagaaaacactgaatctgctgacaccttgatcctgtgcttctgacctccatcattgtgagaaaataaatgtctggtgtttgtgtcacccattctgtggtattttattatggtagctctagcaagctcatacattgatgttgttcaatatatttatttcctgcttgaatttgctaaaatgagctttgttgttggaaactaaaaacactgattctgcacattatgtaattgtaggaatggtttccatttctggtatggctgggttagttcctactggactagccctcttgcagatgacaactataaactctgaacacacttttaaaattggatatttcaagcattttttaaaattcctccaactacttaaaggcattggagaaagaccaaaagtaggcatataccagaaggggcttgacacttgataaatgggaacagcactgggtgtttcacattttcacaacttttaggctgaggccaagccctaatctttaccatatgggggtggctgaagctttaatgaaaaaacttactgatttttctggtacaaagaactattagaaagagtttgaggtgaccacaagccgtggacagtgaggagggagacttagaaaggacagagacaggccgggtgtggtggctcacgcctgtaatcccagcactttgggaggctgatgcaggcagatcacgaggtcaggagatcgagaccatcctggctaacatggtgaaaccccatctctactaaaaatacaaaaaaattagccgggcgtggtggtgggcacctgtaatcccagctactcaggaggctaaggcaggagaatggcatgaacccgggaaggtggaggttgcagtgagccaagaacgcaccactgcactccagcctgggcaacacagcaagactccgtctcaaaaaaaaaaagaaaaagaaaaagaaagggcagagccatagagggagcaccaaatcctgaatatatacttagatcaaatttctggctaatcccctccctatgcatgtgtgggacagaccccaagcagcttagataagagtaaaataactgaactgaaattcatgttgctgcccaagaaacataattttcagttttagtctaattaaatcaattgcccactaaaacaaacaaaaatcaatcctcttaagaagaatataaaagagtccagagtttccacaatacatttttaatgtccaggttacatttcaaaaattatatgacaaatttgtaaaaatgaaaatgtgacccattctcaagaaataaaataatggagagtttgaattaagatgttaaaccatcattataattatgctataggaaataaataaaaatatactcacaatgaatgaagcaatcattatttcagtaaaaaaaaaactacaataataaaaggtccacatggaggttttagaactaaaaaatataatatttaaaataattatataaatacacatataagaattcagacacatacatgggagtctgaaataagaaagaaacaagagcagcagctgccacaaggaaaatgttttctttcatccagatttaaagtcctgattggccgggcacagtggcttatgcctgtaatcccagcactttgggaggccgaggcaggcagatcacaaggtcaggagttcgataccagcctggccaagatggtgaaacccctctctactaaaaatacaaaaattagcaaggtgtggtggcacaggcctgtagtcccagctacttgggaggctaaggcataagaatcacttgaacccaggaagtggaggttgcagtgagccgagatcgcaccactgcattccagtctgggcgaaagagcaagactccatctcaaaaaaaaaaaaaaaaaaaaaaaaaaaaaaaaaaaaagtcccgattatccagaacctaggaaaaagcaccttggccatggtccctcaaagactgccagatacttaatgagaaggtaaacagaagaggcagagaagaggtactgaatctattagaaacatttgttgccacagttgccttattttgccaagatagaactttttgaaggtgatcttctaccatcactatcactttgtttaaaaagagaaacttataagtaacaaaaatataatttcagaatatatgacagtctcccaaaaaggacagatgacaactttgcattgacatctaaaaagggagcaaggaggaagaagataaatttgaaaactactaacacaattcaaaatgttatttaatggtactgtaccatacacaattgttttcttgatacaaatctttccatttagaatctatatttcacagtgcaatgtattttgatacttcatttttgttttaatccagttaaaatgtgaaaatccaatttcacgttaagaaaaaaacaaaattcctaatatcattttacttaatttagaatattctgagttaacagagacatctcaggaagaaaaacttaacttcttcttgaatctttttacctatgggctgggaagaaatcagatgactgcaggaatggttctgatggtaaaggccacagaaatgggactaaagatacgtcccgattggtcgcatcgcacctatgacccagtgtagcccagggccccggacactaatgtgaagccaaaggagtttattgcgtgggtgaaagttttgctgtggatcagccatgggaaaatagctagtatacattgatctagtgccctgaggaaatacaacaactaggttctcacttggtcagtggggtatctgaaatccaagcttgcatctcagaattcagtctggccatcagggttggctaatactgatgaattagagtccaaccacttctggtccaagagtgcttcaaagtttcctctgtgtcattcatagaattctttaatattccacccaagcctgggacagctcctagttttccggtatcagccaggcccgcttatctgctcaagaagcctatatataaaatttgtattgtaccaagccttctgaagtggataattccttaatttggaaaaaacatatagataaactttcctagatcagttcatcttaacatttatctattttctcatcatttttatgtgttctaattttgatgactttcagcacaaatcaaaacattgtttactgcctccgtttttgaaatttgacggtggtttcatcctcatgcaatctcacactgttttctcttcataatgcacattttatcgctgcaatgtcaccttgagtctttcaataccagttgaaagagcattgttttatcctcatatccgttcttttcttgaagctatagcttttccaatggctatgatctatatgtttttcccaacctttcaaaggaggttgatctagtatttggagtagagatagatttttctcagaaattgcatagttaccattttaatattttatcattctgaggacataatggcttaaatttactctagcatcactttgtcagattcaagacccagcagcaggaagaataagggagcttagtcctttcttcacagagctcctctttcatatttgttgtggcaattggaagatatgtagccagtgagctggtggctcactaccatgcctctttattggggcatatctgtggcagctctcctgctttatgccagccaggaccaccctgggagtatgcatcacagagcacttcccactgtgcgacctccaacatgaggtgcttttcccagaggtataggtagcatttgcatccagcccatccctccatggccacagggcccaatacccaccctctccactgtccctttctgatctaaattaaaaggtatcaaaggatgctttagatcagaatggcatttatttcttaaatgagctattcttttccacacaggaaatatatgttagtttaaacattctcctaatgttgtgtattgaacacatttcttatatattgaacacatgcaactcaaagtgtctagtgtctagtgtgaggtcatgtactaatgtggatacacattcttcgttatttttatttctttatttttattttttgtagagacagggtctcactatgttgcccaggctggtcttgaactcctgggctcaagggatccacctgcccctgaaatgggaaaagttcccttatccccctcgcagggtgtgagacagagggagtggcttgcttcttcagtgccccactgctgaaacctctaggggagcatacagacgggaaggttgtggggctccaaccccacggcagtgtctaggggtggatgtttacagctcccgaagcctcagtgggcacgtgctaccatgtgctcttttagttatgccatctgtaggtggcttgtgttaaccagctcaattagaccctctaccttgttgcaaggacagagagctttctgtatcccgggttctcgccttggtgtactggaagaactggatcacacctgggcttggagaatgagtacagagttttattgagtggaggtagctctcagcagatgagggaaggcagaagggggatagagtggggaggttttcccctggagtcaggctgctcaacggcctgggctctcctccaactgccccagcgaaactccacatcattctgcttctgccagtcggtggccagccagcggtctggggcccaccggtgcattcctcttgacgtccagcggcttgtgtgcatgtctgctagggtctcgggggtttttataggcacaggatgggggcatggtgggccagggtggtcttgggaaatgcaacatttgggtgcaaaggcaggagtgcctgtcctcacctaggtccgtggtcacaggctggggagtggagcccttatcagggaccatgccctcttctacgtagcacttctctgtctcccttccatatcacctcgacctcccaaagtgctgggattacagacataagctaccatgtctggcccaaaattttctttatttttaaatagatttgataatttttaaacattgagacttatgtgcatccacacataaagagttaaatgtgtgggatcaagccaccatctttactcaagtataaactgcagtgcacataggattcgtctgaccagcagacttccctcaggaaaccactcccttgttcctcatccatgtgttttagtggggctcaggtcatgctcactaccacagaagtgaacacaagacctacatctgaccaatcagttgtccagtccccactcacattggtctggagatgaacacgtgatccagggggagcgtcttccctagaacctggctttataggagctatgagaaaggatggtcctccttctcaggggtcatgggctctacggaccatatgggctggtggctgctggaggccatcttgcctatgatctatggcaggaagctatctgagaaagttgccaggcagaggcaacaatttccacgatatgaatagagagacagaatcctgacactgatgttaccggctctgttactatatgtgcctgatgccagatctttcttggatattccatttacatttgtaatgtaattgctaataaattatctacctcatttaaggtactttggtctagatttctgtcacttgcatgcaaagttgtgctgacctttttataactgcagcccaccttcttctcatttctcttatctcctcatcgatgaacatttttaataactttcatattccacctgatttatatgaattacatgttctactccatatttcctatgctagctgccaatcactatgaacaaaataacaagaaggggtggattgaatgaaactaatatttactgagcacatgtcatgtgtcaggacacatactgggccctttatctcaattaccttatttaattttcacagccatcctttgttattaattctcacaaccactctaaggttgctattattttcacagttttatgaatgaagacccccaaagtttctaaaatgaagtctaaaatctttttgccataatcacttgcttcctcttcccttcccccttaatttatctcacagggatgaaatgtaataaagtcaggttaacacgacacagtgcagaacgctacattgccacccttaggtttcgtgaaaatctttgatcttttgtactatctttctttgataaaaatacatatgtttttgtatattaaaactttttaaattgggatatgcctatgattgattatacatttgatgaatcaattcctttttcttgaggagttcttatcaagtcaatggcacattatacagtagagccatgtgagagttaaggaaacaaggcaatgaactccttctaccgaagccaaattatgctacttatttatgcctcagagtgaatgagttcatctgatggtttctcagctcccagtcaacagatattaggcacagaagcctttggagtggagaagggagtgatacatctcctaaccagggcattcccgaaagaagtatttaatcaccatcatttgcccaaaaggtgctgtgaaaatgccaggagactgagaactcagagttcggagaaggttgtgggctctaggaggtgtgcaaaggtgctagaagtgcttctagaaggacagaggaaaacagaaggcaatgcacctatgaagtcatcatggctccaggccacccctgccctggaatttcttttgggcattctgcttgatattcgcataagaactttaatttatagcacctgagattttttctataaaatgttagctgtcatttacagatgcaggcttttaaaaagggataaacatgaactccaatctatgaatgtaaaacccatcatttttgttgttctctggctttattccatgtgtctatgaccaaggtgtttttctctcattggtcatagtccatggcataatgtcctggccttatatcactattgactcctacattaacttaatgactattttaaatagcatcctttcaatgatctaatttgattctcactgtcctgttgcaagataaggagggtaaattttattatccccctttttactcagttgacttccccagagtagactctcagtgactatttattgaatacatgaatacataaaaatgaagacactgattgagagacgtgcatgtgtgtgtgtgtgtgtgtgtgttatttgccctaggtcatactggacatcaaaagcggaatccaaccttgctggtatccagccagaatattttgcctgcaaataatagtctttcctgagtctcaacctgcccatcatcctggcaaaggatcaaaatgaccccaaggtgaatgacgcaggaatcaaatggaggagaaagtaagttctttcacagctctgggtcttcagagccaagtcacatactgggaaatgccggtgacacagatgatgactctcagccttatcaccaggccgataggagggagggcagaagtctccactctagagaactgaatctcttgatcttctgtgagataatacttttaattttcatcagtgcaagagcatgtctcaaaccagaaggggtttgcctaattcatcatgctcccaggccacacaatgggacccctgacaagcagaacattggagagggaaagaaatggacatcatgaattctcatgaattgcaaatgcttcttcattaaaggatgttgtcttgcttgggaccatctgcttgatataactgggtccaggttctcgggctggaaacatctgccactttaataattttacctcttaattaaagcacaacaaaaaggaggccaaacatagctatgaccctggacatatcagagtttaggcacatagactggagaacacactcacgttggttctatgtgaatgagaacacacaggtgtgctgttcactcaatgcatgcactccctacccagatgaaacaaatttaggtaattgaatcctctatcccattgacttgaagtactatttcaaaggcactttgtcttgagtttaattgatcttccactggtagggcctcctgaccagttgtctttaagctactctgccctgcagcatcttggtcaagtagttaatgatctataaataaacactttaatgcactaggggagatgctatttaaagaaaccccacagctaatccttttataccacaaagaattcttctgtaatgcaaacagtcaccctttaattggtctattttgtaagttcagcttttcatatcaattttcacatacatcatcaaagaaatagcgtgcagaaacactctagtgtgtacacagtaaagcaatagacaaatggtagatgacagtagtatttctcagttggggaggcacccacatcattttgaactcaggtcaaactataagcatgccacagagattctgactctacatctatctttcctttccccacactccccactccattagtctgaaatctctcaagagcttagatgcctgcatttcttttatttctcatgttgtcttatattgggttatgctccttgagattctgccaaagtgattgagcagtaagtcccatcatttgttcattctttattcattcaacaaatacttattaagcatcattttgtgcactgggaacacagccacaagcaagacaaggtaatttccccttggcgctttgttgaaggagagtaaggagaagtaaatatatgaataaatacagaatgctcaataaaatgtcagtattgttatctatgatgacaaataaaccaggggatagagatggagatgcaattttaaataggttttgtcatggaactcccctcttaagaagtgtcacgtagaccaggcatggtggcttacgcctgtaatccgatcactttgcgaggccgaggtgggtggatcacctgaagtcaggagttcgagaccagcctggccaacacggtgaaaccccgcctctactaaaaatacaaaaattaattgggtgtggtgataggtgcctgtaatcccagctactggggaggttgagccaggataattgcttgaagccaggaggcagaggttgcagtgagccaagatcgtgccattgtactccagcctaggtgacaagattgaaactccatctaaaaaaaaaaaaaaaggatcaagtagcataaagctaagcaaaaagcaagaggaaggaaggcatgggaatatctgagtagggaggattccatggaaaagaatcagcaagtggagcagccctggcatagaaacacatttggtatctttggggaacagcaagatgactattatgtacaaaacagaatgaacgagggcaatggtggtaggaactaagatataagaggtatgtaagggccaggtcatggagttttgtatgcatggtaaggacctggtcataagaggtatttacataagggaaaggaagaataccatgttccaatggactgggaaacagaagaccatcatattctgttcagctccttattctctgaagaaaaaagaatgaatgcttctaaaacccaaggcagcattaagagcctcttcctaaagtgtcagtgaggaccctaaggacccttagagatcatggcccaacatcctcactgaacagttgtaccctgaataaattctgggattctatgcagttcaagctcagggaaatgtgcagccatcaaaggtaatttttgaaaaatcatttaaatatttatttgaaatgtgaaagttgtcagaattgaaataaagtcactcatgttaagaaacccctgacaaatagagtcagggaaggccacaaagagagggttcttatgcttatttgcctgttaatgaaaaagactataaaacctcaccttacataaaggtcatcacaatttcatacaaaaaaaaaaaaaaaacttctgcaaggacatctgtccagcagctctctgtccaacctcagactggcattatccttgttattgatccttgtagccaaggataattattttaagacaaacatgtaatcctcctcactttttcctctaaaaacttttctcttcctttacctcgggttacctccttgaatacacacatagtttacaatggcatgtgtattgccactgcaatcctctattcttaaacatcttttattttagagagtctatttctgttatttagactgacagaagaatcataatggagattaaatgtacaattcagtcaagactacttaaaactcctctcttctcttcttctattcctctcttctctctcttcttctattcttctcttctctctcttctcttcttctattttctcacaacccacctttgctttattattgtttctgtttttactgttctctctcctttgtccccaaaagtatcagacacactgagcttgtagattgaactctttcttcctttacccaaccatcccatgctctgccacccaactagaattcagccaaacactagtctaggtgctgctgtgaatgaattttgcagatgtaattattaacatccctaacaagtcaactttaagtacaaaagattacctgggtgggcctgaccgaatcagtggaagccacataaaagtccctgaacagactccaaagagcaattggatctacaattgttcttctctcactggatcttcccttcttgactctctgtaaacaactgctttggcctgtgtctctgaagtgctagcctgttcattatctcttcttgactgcccgacctatgaatttcagacttgcttggccgtcctcacaattaccaagccaattgcttgtgataagtctacttgtatctaaataaaattttagcaaaaaaagccaacaatatataaaagggataatacatcatgaccaagtgaagtttatcccaagaattcaggattggtttaatatttgtaagtcaacaatataatccttcatattaacgaattgaaaatgaaaaatcacataatcatcttgacagctgtcaaaaagatttgacaaaatttaccattaatacctgatattaaaaacgctcctagcaaagtatgaatagaagaaaatttcttcaacctgatacaggacatctgcaaatgatgtatagtaacatcatacttaacggtggaaggctgaatacctttctactatgatcaagaacaagccagagatgtatgctctcaccacttctatttaacattgttagtggtggtcctagccaatgcaataaggcctgaaaaagaaacaaaggcatcaagattataaatgaagaagtacagtgtttactcataaatgacatcatcatctacacagaaaacctgatggaatccacaaaaaaagctactacgtgggggaagcagccaaaatggttgaatagaaacagctctggtctgtggctcccactgggaagaacgaaaacagcaagtgagttctgcatcttcaattgaggtacccaggttctctcatggggactgaccaggcagttggtgcaacccatggagaatgaggaaaagcggagtggagtgagggcttacccaggagctgcaaggggcaacagaaactccctcccacagccaagacaggtagtgagggattgtgctactccaccctgaaaaccttgctttccccacagagctttgtaacctttggatcaggaggtctcttcatgagcccaacaccaccaggaacttgggtcccaagcacagagctgtgcagactcatggcagttgcttgagtgggcagccactcagtcaggcactgagacacaggagtctgcatattctggctctgggaactccagtgacacaggagatctgtccacacccctgggaaggaggctgaaaccagggagccaagtgtccccattcagcaggccccactcccaaggaactccacaagctaaaactcactggcttggaatcccccctgaccagcacagcaagctggagactgcttaagaagaccaagttctggtggggcagggaggggtggccaccatcactgtggctccatttggccatttttcctgctgccagtgccagcaagactaggcagtttggaccaggagcaattctccacagcacagcacagcagctgtgatggttcatgtccagactgcttctttaagtgggaccccgacccattcttcctcaccaggaagggtctcccttcaggagttttaacatccccagccaggggtttatggacaaatctctgatctccctgaaagaagcccataggaggaggggtggcagcagtatcatggatcagtagtcttagtcttttctgccttccagatctagagagtcaaggcagcccagacaagggggattcctcccagtgaggcaaacctgctctgccaaggggctgccaaactgcttatttaagcaggtctctgatcccattcctcctgactgggtgagatcccccaacaggggtctccagacacctcatacaggaccattccagtgggcatcaggttggtacccctctaagacagagctctgagaggaaggggcaggttgctatctttgctattctgcagcctccactggcgatacctgcaggggcaagaggaatccaggcaaatagggtctgaagtggactcccagcaaactgcaacagctccgtggaagagggccctgtctgctaaaagaaaaacaaatggaaagaaacatcgatgaaaaatgccccacaaaaaccccatccaaaggtcagcagcctcaaaggtcaaagataaataaacccatgaagatgaaaaagaatcaatgcaaaaacactgaaaactcaaaaagccagagtgcctcttctcctccaaatgattacaacatgtctccagcaagggcacagaactggtatgaggctgagatggatgaactgacagaagtaggcttcagaagacagtaataaaaaaccttgctgagctaaaggagtatgttctaacttattgcaaagaagctaagaaccatgataaaacattacaggggccattaaccagaataaccagtttagagaggaacataaatgatctgatggagctgaaacacaatacaagaacttcacaatgcaaacataagtatcaaaagtcaaatagaccaagaggggaaaggatatcagagctcgaagactatcttgctgaaataaggcaggaaggcaagattagaggaaagaaagaatgaaaaggaatgaacaaaacctctgagaactatggaattatgtaaaaagatcaaacctgtgactgattaggggtacctgaaagagatggggagaatgggaccaagtcggaaaacacactgcaggatatcatccaagaaaaatttcccaacctagcaagacaggccaacattcaaattcaggaaatccagagaatcctggtaagatactccagagaagatcaaccccaagacacataatcatcagattctccaatgttgaaatgaaggaaaatatgttaagggcagccaaagagaaaggccaggtcacctacaaagggaatcccagcagactaacggcagacctctcagcagaaaccctacaagccagaagaagttgggggtcaatattcaacattcttaaagaaaagaatttccaacctagaatttcatatccagccaaactaacctttataagtgaaggagaaataaaactttttcagacaagcaaatgctgagggaattcatcaccagcaggcctgccttgcaagagctcctggaggaagcactaaatatggaaaggaaaaaccattaccagccactacaaaaacacactgaagtacacagaccaatgacactatgaagcaactacataaacaagtctgcaaaataatcagctagcatcacgatgacagaatcaaattcacacataacaatattaaccttaaatgcaaatgggctaaacaccccaattaaaagacacagaatggcatgctggataaagagtcaagatcctccagtgtgctgtattcaagagacccgtctcacatgcaaagacaggcataggctcaaaataaaggagtggaggaaaatttaccaagcaaatggaaaacagaaaaaaagcaggggttgtaatcctagtttctggcaaaacagaccttaagccagcaaagataaaaataaagacaaagaagggcattacataatgataatatgataagggcaattcaacaagaagagctaactattctaaatatatatgcacacaatacaggaatacccagatttataaaacaagttcttagaaacctaaaaagagactcagactcccacacaataatagtgggacactgtaacaccccactgtcaatattagagagatcattgagacagaaaattaacaaaaatattcaagactcaaattcagccttggttcaagtggacctgataggtatctacagaaccctccacccaaaaacaacagaatatacattcttcttggcaccacaggcatttattataaaattgatcacataattggaactaaatcactcctcagcaaatgcaatagaactgaaataataataaatagtctctcagaccatagcacaattaaattagaactcaagattaagacactcactcaaaaccacacaactacatggaaattgaacaatgtgctcctgaatgactcctggttaaacaatgaaattaaggaaaaatcaagaagttctttgaaactattgagaacaaagagacaatgtaccagctaaagctgtgttaagagagaaatttataatactaaatgcccacatcaaaaagctagaaacatgcaatatagaggacataaaagatacagtttgaccctgtatttttcccttagaatagttccttccataaataagactttatttttacatatagattgtcctatagctggtcttggatcataaagttaattatatagttgataaaaatctagaccacacatttttgtggtcttttgtcaccctagaccacacacaaaaaaacattctccaagtggatgctcaggtcagactgatacttttaaacaaagacatttactgaagcttagaatgtaaagcacacaactatttgcagcagcaatagtctttcaaaaatgactaaaacaaactttaaatataaggcatataaaacagactattaaggatagttttccaaactgtatctagaaatacaggaaaatatgtattgcctcgtaataaagttaaataaatattctttctcacttctataaacacaataagaggttatagttttatttggttcccataagttaaaaactctgattgcttttacataaattcctccaaattcttagctactctcagatttttattaatgccttttcacaaaacacagagattatctctaacttcctttcagaaatgtgctttttcattggtttaaataagtatacttaattttctagcaataaacatgatttaaaatttaaggttcaaggtaattctagaaaaaggtagatactgtctatttctgttacacaatttgttatttcttcaaatttcctatagcagcatgataaatcatcaaagaacctgtttgagatacaaaactttggtagaaaatatttgatgagtatcttgattataacctagaatatgtatatattagtaaaataaccagatatactacagaactctcttttggctcaaacagtttgacctcaatccacgtttactcttgatatcactctattggctgaaggaggaaactcaaacctcagggtttgtttttcccaggacagatagtagtgatagtgcattatattttaataagaaaaacaaaccagtaaaccttgagaaattttaaaaagcatagttgagtcatattttttcataattatatacttatctatttattgcccatggaaaatatatgtatagaagtatttcttctgttatttgttactatcttcttaatttgttccaaagataatactgccatactgaattccctctggaaggaaacaaaacaaaactcactcaaaaccagcagtgctgctatcagataagtagatgtcaatgtatacttacaaggaaagcctaaaaaatttaatgtgttaattcagcccttttctttttttttttttaatttacttgtacttttttttttattattatactttaagttctagggtacaagtgcacaatgtgcaggtttgatacataggtatacatgtgccatgttggtttgctgcacccatcaactcatcatttacattaggtatttctcctaatgctatccctctgcaacccccaacctgctgacaggccccagtgtgtgatgttccccgccctgtgtccaagtgttctcattgttcgattcccacctatgagtgagaacatgcagtgtttggttttctgtctttgtgatagtttgctgagaattatggtttccagcttcatccatgtccctgcaaaggacatgaactcatccttttttatggctgcatagtattccatggtgtatatgtgccatattttcttaatccagtctatcattgatggacatttgtgttggttccaagtctttactattgtgaatagtgccacaataaacatatgtgtgcatgtgtctttatagtagcatgatttataatcctttgggtatatacccagtaatgggattgctggatcaaatggtatttctagttctagatccttgaggaatcgccacactgtcttccacgatagttgaactaatttacactcccaccaacagtgtaaaagtgttcctatttctccacatcctctccagcatctgttgtttcctgactttttaatgatcgccatcctaattgacgtgagatggtatcttattttggttttgatttggatttctctgatcaccagtgatgatgagcattttttcatgtgtctattggcaattcagcccttttctatgtaatatttccaagtcagactttcttacattcctggaatttagtttgatataccaagaataataatgataaaaataatgataaaatatttgctttgattaccatgggggggtgaatgaaatgtttaattgtattaaaacaaacaaacttttcagagaaaaaaaaagctagaaacatctcaagttaacaacctaacatcaaagctaaaaaaactggagaaccaagagcaaacaaacaccaaagctagcacaaggcaagaaataaccaagctcagagtgaaattgaaggagatagagacacaaaaaaaactttcaaaaaatcagtgaatccaggagctggctttttgaaaaaaattaatgaaatagactcctagctagaataataaagaagaaaagagagaagaattaaatagacacaataaaaaaatgattgtagggatatcaccacttaccccacagaaaaacaaacaaccatcagagaatactataaacacctctatgcaaatgaactaaaaaatctagaacaaagaataaagtcctggtcacatacaccctcccaagactgaaccaggaagaagtcaattccctgaatactccaataacaagttctgaaattaaggcagtaataaatagcctaccaaccaagaaaagctcaggaccagatggatttacagctgaattctatcagaggtatgaaaaggagataacatccttgcttatgaaactattcgaaacaattgaaagggagggactcctccctaattcattttatgaggccagcatcatcctgataccaaagcctggcagatatacaacaaaaatagaaaacttcaagccaatatccgtgacgaacatcgatgcaaaaattctcaataaaatactggcaaaccaaatagaggagcacatcaaaaatcttattcaccatgatcaagtcagcttcatacctggggtacaacactggttcaacatacgcaaatcaataaacataatttatcgcataaacagaaccaatgacaaaaccacatgattatctcaatagatgcagaaaaggccttcaataaaattcaacatcccttcatgtttaaaactctcagtaaactaagtattgatggaacataactcaaaataatgagagatgtttatgacaaacccacagccaacataatactaaatgcacaaaagctggaagcattccccttgaaaaccaacacaaggatgccctccctcaccactcctattcaacatagtattggaatttctggccagggtaatcaggcaagagaaagaaataaagggtattcaaatagggagagaggaagtcaagctctctttgtttgcagataacatgatcctatatctagaaaaccccatcgcctcagcccaaaagcatcttaagctgataagcaacttgagcaaagtctcaggatacaaaattagcgtgcaatagacacaagcattcctatgcaccaacaacagacaagcagagacccaaatcatgaatgaactcccattcacaattgtcacaaagagagtaaaatacctaggaatacagctaacaagggaagtgaaggacctcttcaaggagaactacaaactattgctcagggaaattagagagaacacaaacaaacggaaaaacattccatgtttatggataggaagaatcaatatcatgaaagtggccataatgcccacagtaatttatagattaaatgctatactcattaaactaccattgacattcttcatggaattagaagaaactattttaatattcatatggaaccaaaaaagagctcacatacccaagacaatcctaagcaaaaagaacaaagctggagacatcacgctccaatggaacagaatagagaactcagaaataagaccacacatctacaaccatctgatcttcgacaaacctgacaaaaacaagcaatggtgaaaggatcccctatttaataaatggtgctgggagaactggctagccatatgcagaaaattgagactggaccccttccttacacctgatacaaatattaactcaagatggactaaagacttaaatgtaaaacccaaaactataaatatcctagcaaaaaatctaggcaataccaatgaggacacaggcatgggcaaagatttcatgatgaaatcaccaaaagcaattgcaacaaaagcaaaaattcacaaatgggatctaattaaactaaagagcttctgcactgcaaaagaaactatcatcagagccaacaggcaacgtacagagtgggagaaaatttttgcaatctatccatttgacaaaggtctgatatccagaatctacaatgaacttaaacaaatttacaagaaaaagaaaaacattaaaaagtgggcaaaagacatgaacagacacttctcaaaagaagatatttatgtggccaagaaacatatgaaaaaaagctcaacgtcactggtcattagagaaatgcaaatcaaaaccacagtgagatactgtctcacaccagtcagaatggtgattattaaaaagtcaagaaacaacagatgctgggaaggttgcagagaaataggaatgcttttacactgttggtgggaatgtaaactagttcaaccattgtggaagatgatgtggtgattcctcaaagatctagaaccagaaaaagcatttgacccagcaattccattattgggtatatacccgaaggaatataaattattccattacaaagatacatgcacatgtatgttcactgaagcactattcacaatagcaaagacatggagtcaacccaaatgcccatcaatgatagactggataaagaaaatgtggtacatatacactatggaataccatgcagccataaaaagaaacgagatcatgtcctttgtggggacatggatggagatggaaggcgttatcctctgcaaactaatgcagaagcagaaaaccaaacactgcatgttgttacttataagtgagagctgaacaatgagaacacatggacacagggaggagaacaacacacaatggggcctgtcagggggtggggtgggaggaaggagagcattaggaaaagtagctaatgcatgctggacttaatacctgggtgacgggttaataggtgcagcaaaccaccatggcacacatttacctatgtaagaaacctgcacatcctccacatgtaccccagaacttaaaatttaaatttaaatttaaaaaaagctactacagttagttagtgggtttagcaaggttgtcgcatacaaagtcaccatacaaaagtagttgcatttttatgtactaacaacaattacttggaaataaaaattaaaaactaatgccatttacaattacatcaaaaatatgaaatgcttaggaacaaatctgattcaggacatataagacatgtgcaatgaaaatttaaaacatcactgggagaaaaaagaaaaatctaaataaatgaagagatatatcttgttcatggatcaagagactcgatttcattagaatgtcaatcatcctcagattggtctttttttgttttgaggcagagtctcactctgttgcccaggctggagtgcagtggcgcaatctcggctgtctgcaagctctgcctcccgggttcatgccattctcctgcctcagcctcctgagtagctgggactacaggcatctgccaccacgccaggctaattttttgtatttttagtagagacagggtttcactgtgttagccaggatggtctccatctcctgacctcatgatccacccacctcggcctcccaaagtgctgggattacaggcgtgagccactgcgcctggcctcagattggtctttaaattaaacttaattctaatgaaaactccagcatgatttgtagcaattgcccagctgtctctaaaggtcatatgaaaatgtaaagggcatagaatagcccaaagagctttgaaacagaagaacaaatttggagggggatcactatctgatttcaagacttattacaaaaccgtgtaacaaaagctgtgtgttttggcatctaaatagacaaacagatcaaaagaacagaatcaagagaccagaaatagaccagaaagaaaaaaagctcgtcactggtcattagagaaatgcaaatcaaaaccacaatgagataccatctcacaccagtcagaatggtgattattaaaaagtcatcatatggacaacagatttttgacaaagacataaaggaaattcagtggagaatatactcttttcaacaaatgatgctggcacaatgattacctacatgtagaacaaacacacaaaacacatcaatccatacctcacatcatatacaaaacttaactcaaaatggattatagacctagatataaaataattataaaactctagcagaaaacataggaaaaaatcttgtgacttgggcttggcaaagatttcttagatgcaaacaccaaaatatgtaaattttttatacaacattgataaactgggcttcagcaaataattaaaaacttctgctctttaaaaacactattaggaaaatggaaagataagctacagactggcaaaaattatttgtaaatcttatatctaacaaagggcctgaatccaggctatagaaataaatctcaaaacgcaataataagaaaaaaaatcaacccaattaaataatgagcaagatatttgaacatggttcaccaaagatatactggttgcagataagaacatcaaaaaatgttctgtgtcattagtcatccagggatgcacattaaaaccacagtgagatactactgtataccttttagaagggctacaattgaagactgaccaaatgatggcaagtttgtggaggaacaggaactcctacacactgctggtaaggatatcaaatgacggaaaaaagtcaaaacttatagctgccaaaggacccagccattttatttctaggtatttacctaagaggaaaggaaatatatgcccctacaaagacttgtacaaaaatgttcctagcagttttatttggaatagccccaaactgaaaacgatcttaatgtccattaacagatgaatttgtgttactcatacagtgaactcatataccctgagcaactactcagagtgaactattgatacactcaacaaatttattttcaaatattttcaaaaatgtacaagcaaagagatgaaattaatttcaaatattctgtatttgagttgcatataaattaattataagaaaagaaagttaaatattcaggtcttcagtcacaccagccacattttacaatagccacatggtgctaagagctactgtgtgagacaatgcagatctagaccatttgacaatactctaaagtttctctgtgatcagtatttatgcaaaacacgaaggtcaactaattcctttaaatgcttgcaactcacctacaacaaatgactgaaggttccatatatagcagaaaaagggaggcagtcatctcttttctcctctctgtgacttaacacttcatttttagaaagagagtgcaagtggcattttgggaacagctgggtgtgttcaactggtcctagttctttgtactcatccttccttaccattggaaatctctaaagctccctgagaagagtcatttacttttgtaatgtcaagttcccccagctcagtctgaagtgtgtctcccgtgtgtcctgtggggtaccttgcagtcctagagtggccaccacaactcctgttcccgcaaaaattcctcaacagctcttcctcctgcaaaccctgctttactgtctccattacagacctctagagcttcctcccacccaaatggcagattatatagaggagtatgggagaaaagagcaaggtcgttgaaaaaaaatacaaaattttataacagtaaacttttctttcgtggagtcaggagtaagagtgactctctggagaagtccaataaagagaggccagtttaaggtcctcaatctagcccagaacacatggatcaaaatctgaaacttggtattgagaattatactaatttctttagtaagcatttgacaagtagttatagcattattattgttgtacacacacttctagaagatctttccctctcccttttctcaaattaaagaaaaaaaaatttctggtgccttgaaatggagaaaaatcagtgccattggagcctttgtcatgggggccatctctgtagactctgttttctaggactttttttcgacaactaaaatgagattttgtgtccaccctgtcatccttctccataccttgtcgcttcccactccacccacgagggttttgggaagaggggaacagtatgggcactcctcagttccaactgatcctggatgatagaaatatgttgcatgacataaaatgggcaaaagaaaaagggagggatgagggaataattgaaaactaggacctgtattacctatttaactcaagcaaatttccaaacaaccaaacccacacgctcctctggggctccctattcctttccagtcacaattccaggattacatttataggatccggatgactaccatgttctgggcagagtcaatgcttactctcttgtcaattgaaagttttgaacactgccctttcctgcaggagtctctgattcttactgcaggggattggagtcaacataattaaccttctgcttcctaacaaccactgagataatttgatatgtgtcccctgtaatttgagggacaaaaaaaagcaggcttctaattcacatctggacaagcaaaatgcaggatgctgtggctggctggttgctctgatcacagagaggtgactgtatgtggaatgtcacatgggctttccatgagccagacctgtagctttggaaaggagctttgcccagtccaatgtagatgagcaattattagcttgtgtgctagtagaaattttgttcagaaatcatatgaaattgctggtatgcaaaatgtaaatgagctagttacatacatacagcacatatgcggagcactcttctgggctctagagtacatatatgaatctgttccaatgtggggcatggggtgaaatctagctggtgatgtggtgatgagccattctacatggtgatgtgggctgtgtaggaagatgatgggaatgccacagtggcctcagtgataacacaaaattctcagtcctttatatatttaggtgggtaatgttgtaaagcactgagttataattattcaaatatatattttatattgcagtggtgaagggaaagcttcccctttgctcttggaaggttcactgaaaaatgaactaataaaaaagcagattaagaagagaaaaagcatacaaatgtattactaccatgcacaggggaagaatcacagtggttgcccagtatcccagtgggatatggatggtgatataccctacttcttaggggaaagggagatgggaagtgtggatgatttttgggagattgtaaatgatttatttttaggggaactcaatgggtttgaagaacatacaacggtcttagacaaagtctgttaggcccacagggaagaaagtggtttgtgaaaaaagtctctaggtttgttaacagactttagtcttctttcttatgatatgggttcagttcacgaaaactcaggaaagacaagtggtaattgttttgtactctggtaggtctggactttaggcagatacttcagagaacagcttcatcctgtgcttcaggagaggttaaggactgacagcaagggagggaggaaaaacaatgttctccttggtggatctgcccagtctttatgcagataggggaaaagtctcttccagcatctactgatctctaaaggcctgtaattcaaaatacgcattataccttgctcctttgatatcctagctcctgatccattaatggatcagaaaacaaagaaaatacatccagaagatgttggcacttcatcaaagggcaacaaaagaaaatgcgtttttggaaataatatagttaaactccaggagcattatgaaatctgtataggtcttgtccaagacattctgtacagatgatcttttactataacaataaatatttattggaaaccttattttgttggataaatagactgtgggcaaaattcaaacattgctcattacttaatcaaagcctatattcatatgaccccttaattaccctgatacattcccaagagtctaaattaccttctccaacaaggttgtaaacttcctaaaggaagatctgtccctgtcatttttgttgtctttcttttttttttttgagatggagttttggtcttgttgcccaggctagagtgcaacgacgcgatctcggctcacagcaaactccgcctcccgggttcaaaccattctcctgcctcagcctccggagtagctgggattacaggcatgcgccaccacgcccggctaattttgtatttttagtagagacagggtttctccatgttggtcaggctggtctcgaactctggacctcaggtgatccacccacctcggcctcccaaagtgctgagattacaggcgtgagccaccgcgcccggcctgttgtctttcttagggtctttatttgcacagtgaatataaacattagtttataattaatttcactgttccctctgctcaaccctagccaattatgttttaatgatgccacattgtatagcccgtatgaaacgatattatgatatttctatagtgtctgaagtattaacagttgcctgtgtgtcctacagttttcagcaagctgcaggggtgaaggggagatggtaggaatgaggaagagaattgaaggacttcaaatgaaaaactctaagtccccaaagacaaacagggcctaataaacacaacagtaacaataatacctaacacatattaggtgcttactatttgccagcattatgtcacttagcactcacctctgtgatatagatactattattatcttggaaagttcaaataacatcccacagtcagtgaaaaagctggatttgaatgcaagatgcctgaaccccatgctcttaacttccacctcacacagggctggccgcctcttgaggcttatacggcctttttttttttttttttttttttgacagagtcttgctctgtcacccaggctggagtccagtggcgtgatcttggctcactgcaacctctgcctcccgggttcaagtgattcttctgcctcagcctcctgagtagctgggactacaggttcatgccaccacgcctggctaatttttgtatttttagtagagacgaggtttcaccatattggccaggctgatctcgaactcctgacctcgtgatccaccctccttggcctcctgaagtgctgggattacaggtgtgagccaccatgcctgggctacatggcttttttaatgacaagttagagcaagctaacttcctagtcaattcaagaatgaaaaaacaacaacaaataaacaccattgtttggcattgtggagacaatgatgggattgaatttatgaactctaggcgttcttcttcccctaatccagagaaatcactacaaggccactttcatttctttccctaaagagggaccacctaaaacgctctgcccctgagggcacgagataaagtccatggtgggactttagtgctgagccttgcaaaggatcgatctcacgcttcacttttctcatcagtggcttcatctgaagcagcatgatggttaagaaggcttcgggtgaaaatgactcaaagtaacaaaccagacacccatttaaagcttcccagtgtgttaaaagcatgtctcttcactgcaagacaaatactgtgggatcaacaagccctggagacagatggaagaaattccaaacagcctcaggtggttcgtagtcagctagccagccaccaaagccagtggctcacccctgggagcctcctgccctggggtctacacatagaaatagtcatttggttcatttcattgaccatttaaaaagtatattttgcttagtgcacaagtacagctaggagtgaaaaaaattatgaaaatgaattctattcaaaatttttagtttgtgggtttgaagttaggtaagaggaacaagagagccaatagttctattacccaagcaggggctccccctgctggaaatctattttgaaacccataaattgttaatgatgccttcttgaattacctatatggcagtggaacaagaaaagcgccagtaatttaaatatttaaggctgatatcatctatctacataggtaatgaaagtgtttcctatacttctagagttcaaataaataaaacaagattcacctgctttaggatgaatagaatgaatacagaatggtgttataaattttaggaaaatgcaccagaaaatgatttttgtgttgttgctgttgttattcttaatttggcagagcaatagaattatcctggaaaatatctaatggaacccaaaagagtaagagggtaaaagggatgattttgtactcaacatcctgatagacaattaggaaaagtttttcagctgcagtctatctgagatatagactcaccttgtatttctcagagacttaggtcctaaccatgtaagcatctcaagatgatcgtcgtaactccccaactcttaaacctactggcccaaacaagaggaatcaacatgttgaagattgtatatcctatatctgtgatgcagtaatacagcttaggcatttaaaaatcttatgttaccttggctccatctgaaatttttttaaagagagaaggagagagagagagagagagagagagagagagagagagagagagagagagagaaccagtataaattccaaacagtatcatttgaaattctaaacatgtagatttaaattttggaatgcgcagactagactgtgagtgatacggtctaaaaggcattatcaactatgtcaaatcaataaatcaatcatgaattctcttgcaattcacaacagcccctcgcaaaagagtgcaacaatgtgaacactgccaaatgtatagaaatgactcttcctatagagtggccaacaagacaaactgacattttctctgtactaatagagattgagttcatagcacatttcctctctcttcaacacacacacacacacacacacacacacacacacacacacacacaccctgacaacactcatgctgtctaaccagctgagactgcatttctcactttgaacatcaaagtgataaatcaagattcaattcaacatcatttgctgagtgccttctgtggactccgtgggagatttgtaacaatctaaaagattataagagagaagagcatatgatatgtctacaaataaacttttgagtgtgagttaagaagagtattcatttttacactgaactggagatccatgactctattaacaccttgattctgatataattcaatttatagaagtgatcttcctcacagagaatatagtctgttcaaagttggatccactaaacctactgtggtattgtagataatcaacaacaatgttctgagttaagttgaaatgagaattttatcaaaatactgttttatagctagcttttatcattttataatgtgatatgtaatgcaatgtattgtgattatatttccattttgataaatattctgatacaacaacatttctaatagctgctggcatttcattttaaggatgcatcatcatttacttaaatactattttattattgtttccaagttttcctgttataaacaaatctgaaatgaacgtctttgaagacgctaaatctttgcacatggccttgactattcccttagagtaaaatccaacaggaaaaattgttaggtcaaaggatattttcatatgtgctaatttttttttttttttaagacggagtctcactctgtggcccaggttggtgtgcagtggcacaatcttggctcactgcaacctctgcctcctgggttccagagattctcctgcctcagcctcccgagtaactgggattacaggcgcccaccacacccggctaatttttgtatttttagtagagatggggtttcaccatgttggccaggctggtcttaaactcctgacctcaagtgacctgcccgactcagcctcccaaagtgctgggattacaggcatgagccactaattttgatacatattcacaaatatttccccagagaggatgtatcaacttatgatcatatactaatgtttcttttcccatttagtagacaaagaatcttattttaatttgtaatttttgattcatgtttggcaccttttctaattcttcatttgcaaattgactggttacgttcatccatttttctaccagtatttgcattatttcttactgattggcaacaagtttttatattcagtattgtaacacattgatatatgtgttaaaaaacattttttactctcaagaatagagactgagtcttgctgtgttgccgaggctgatctcaaatgcctggcctcaaactatcctcccaccttggcctcccaaagtgttgggattacaggcgtgagccaccacacccagccagaaacattttctcattcatttattcatgacacaaatatttattaaagatatatatcaagttccataggcaacacggggaaaaaataaggtaaccgaaaagaacaaaatacagttgccttaagctcctgagctgccacactgaacaccaagaagtaatatcttctaacattttgtggagaaaatgtgtgaactaagcattttatttccaaccgattcaggtattcagttaacagaaggacattttcagttattcacaatttcaaaaatattacatccatattttcttgactaattagctgaagatgtcctccaacaaactaaaaaatgaagcccaattaaggattaaagaatgaagatgacatggcataaaatactggaccagctccagaagccagtgatagtaaaatatttgctgagacagatacaaaactacaaaagtgattgttaatgatacaacctatttccaagttatgcgtatgtgataggatacaggaaatgctatccctaaatatggcatcttgtcatactgaatattttaagctgaagaaaattgagaaaaccacagaagcggcaaagtctctctgaccttctctcctgaagacccttaagtgacaaatgtcctgccctatgtctgcagggaaggaatgttacacagagaggccaagaagcatctgaacaaacaggcttgctaagttcccccaagcttattactactaggtcacatccgctttttgtccaatcatacactatctatccattcttcacaaaacctaagcataaaaacacagtttttcctgggtctttgggtcttcatttctgaaggctcctgtgtcatgtaaaactttggtaaaataaatttgttatgcttttctcttgttagtctgtctttgttataggagtgtcagccataaaccttgtgatgaatgaggaaaatatattaccttttcttcccaaatgcaataatatgaattttaagaatctagttcacctttttttcctttttctttttttcttttttgagacaggatcttgttctgtcacccaggctggagtgcagtagcatgaccctagctcactacaacctgaaactcctaggttcaagggatccttccatttcatcctcccaaattgctgggtttacaggcatacaccaccatgcctggctaactttttttttttttttttttttttgtagaaatggcagcttgcaatgtggcccaggctggtcttgaactcctaacttcaagtgatcctcatgcctcagtttcccaaaccaccgggattacaggcttgagccaccacgctcagccaaaaacccaattcgtcttaataaaacctgagaaatggtgaataaagggaaaagaggtgagaagacaggaaaagtttatgacacttttctatttcatagaagtctaaaaattaaataaatatgggttcaacagcatttaaaaatgcaataacataaaaaaaccaagatatatgtcctccaaaacactgaaaaagagatcacagtaaaggatacataattcatgcccaaagaggggatgttaaaagtaaaggcatgcaacggggtgcagtggctcacgcctgtaatcgcagcgctttgggaggccgaggcaggcggattaagaggtcaggagacagagaccatcctggccaacatggtgaaaccccatctctactaaaatacaaaaaattagctgggcgtggtggtgcacacttctagtcccagttactcgggaggctgaggcaggagaattgcttgaacccgggagagggaggttgcagtgagccgagatattgccactgcactccagtggggcgacaaagcaagactccatctcaaaaaaaaaaaaaaaagaagtcaaggcatgcacaaagggatattgcagaaatgtaaacaaaaagaaatggaatggcaatgtaatgttcacacaaagtaaaatccagtgcaataaacattgattaggacaaatagggccatgttacattctcaattcagaccaggataattcagacagggctataaccataaaaattctttatgcataactatcatagtatcaatactaatgaagcaaggaattattagaattcaaaggaagatttggcaaagaataataaactgaatattcaaagcaggaagggaaaagcaagaaaaataaaagtgctaatgaattacaaagacatacatgaaattgataaatataatactttttaataaattaagagagaaaaccactaccaagactaatcaagaaaaagagaaaacacaaacgtgcaaaattacaaacaagaacattggtacaggagatttagaagaactgtcagaaaagcatatataactttatgaaaacaaaatagaaaatctgaataaaatgtaccatttcctaaaaaatatctaaattatcaaaataaattaggagttcaaatgcttaaataggacacaaatcgtgggacaaaagtttgagaaaggtatcaaattgacatcctttagttgataggatagttatccgagagccaagaagtttccactgctaagttctatgaaatcatcaagaaaaccaataagaccaatgttacctaagccccttaatcacacatacaaatgtgcacttgtgtcatgtgacacccttaacataaccctaaaattaaaactcattaaagatagaacacataaaaatttaaaaatcaatctcattggccgggcgcagtggctcactcctgtaatcccaggactatgggaggctaaggtgggcggatcaccacgtcaggagatggagaccatcctggctaacacgatgaaaccctgtctctactaaaaatacaaaaaaaaattagccgggcgtggtggcgggcgcctgtagtctcagccacttgggaggctgaggcaggagaatggcgtgaacccaggaggaggagcttgcagtgagccgagatagcgccactgcactccagcatgggcgacagagcgagactcagtctcaaaaaaaaaaaaaaaaaaaaaaaaatcgatctcatttatgaacaccaaaaaagccataataaaatgctagcaaaaaaagtcaacgtattaaaagaacgatgcaccaataagaaggggactttatttcattaacaaaccattcaatgtttaaaaaactattaataggatttaccacagtaattgcttaaaggcagaaaaataaaacagtcttcctgataaaatctgaaaagatggtaacatttaatataaattatcggttaaaatccctgttgagaatcaagaaatattagcactagcattgccattaaattcagaaaaagagaaagaaaacgatgttcattatcacatctattatttggcatgctttggaaggcaataaagaaaattaagaacttttaggaaaggcagaagaggcatattatctcttttttttctgcttttgctcatgctgtgattatttactaacgtgaaaagctaaaataattaattggaaaaatattagggaaactcaaaaacacagttcagtaagggaaccaagtatacaactggtttagaaaattcaactggtgaccaggcacggtgactcatgcctgtaatcccagcactttgggaggctgagggtggtggatcacctgacgtcaagagtttgagatcaacctggccaacatggtgaaaccccatctctactaaaaatacaaaaattagctgggcgtggtggtgggcacctgcaatcccagctaactcaggaggctgaggcaggagaattgcttgaatccaggaggcagaggttgcagcgagtggagatcaggcccctgcactccagcctgggtgacagagtgagactccatctcaaaaaaaatttaaaaaaactcaactggtttccaacatgcccacaagaactgacaataagatatagcggaataaaatcaattcacgaaagccataaggtatgtgaatgcctagaaacaaggttaatatatattaacatatttattaatgaaactcactaatatatattcatctttataatgaaaacaaaaactttagtaaagtataaacaaagaactaaatagagttattcatactatatacctgcttgggaagatattaattttcccccaattaatttataagtttaacctaactctttcaaaataaaaactgaatgtttgtttttaaaatggaagggccttcttgtataatagcttacagcagataaattcttgctgagaactactggaaaatctgggtgaaataccaaaaacaaaacaaaatctacttaaaagcattgagagataccaaagccatcaggacctgagggactagcaggttagagaaaaggaaacccactgaagttagcccaacactctttcctgaacttccccttaaggaatttgccaattaataaacagaccaagaggttgaaaagtcctgaaagaaaatgctaagggcagaaaaactaagcagagttttcagcacccaaaagcgttagggagacaaaattggacttgtggtctgctaaggcatgaagtgcatgaagggtacatgattctggaaagagaagaaaggcaaaggagcaagccagccaccctggacagctatttccctccatgcatttgccattcggtgaacaacacactccctgaagtctgaaagcagagcagaaagcagctgctaagggggcagtttctaatcaaaactccattgctgtaaattcctaagactgaaatatttctcagaagtgcccaaggatggaaaataaatgtcatcaaaacaatcccctgggaaaacccaagattgtgttagtgaagaaatatgttaactgttcatctccaatatcctgttttgcttcatcttgctcagaaggaataagaatctcatcccttcaaaaataaaaataaaaaataaccaaaaccacaagaataaaaggtgtattactttttttttttttttttttttttttttgagacggagtctcactctgtcgcccaggctggagtgcagtggtgcgatctcggctcactgcaagctccgcctcctggtttcacgccattctcttgcctcagtctcccaagtagctgggactacaggcgcccgccaccacgcccggctaatttttctgtatttttagtagagacagggtttcaccatgtcagccaggatggtctcgatctcctgacctcgtgatccgcccacctcggcctcccaaagtgctgggattacaagtgtgagccaccgtgcccggccaaggtgtattactttttaaactgaaagaacagacttaattagagaattagcaacagctggagcaaacagctgtttcttttcttttttaacatctttattgagatacagttctcataccataaaatagacccagttacagtgtacaattcattggcttttagtatattcacatttctgtttttaaattatactttaagttctgggatacatatgcagaacgtgcaggtttgttacataggtatatacgtgccatggtggtgtgctgcacccatcaacctgtcatctacattaggtgtttctccgaatgtgatccctcccctagcctcctaccccgcaaagggccctggtatgtgatgttcccctccctgtgtccatgtgttctcattgttcaagtcccacttattagtgagaacatgtggtgagaacatgagaactaaacaccacatgttcttgtgttagtttgctgagaatgatgctttccagcttcatccacgtccctgcaaaggacatgaacttgtccttttttatggctgcatagtattccatggtatatatgtgccacattttctttatgcagtctatcattgataggcatttgggttggttccaagtctttgctattgtgaacagtgccacaataaacatatctttatagtagaatgatttataatcctttgggtatatacccagtaatgggattgctgggccaaatggtatttctggttctagacccttgaggaatcgccacactgtcttccacaatggttgaactaatttacactcccaccaacagtgtaaaagcgttcctatttctccacatcctctccagcatctgttgtttcctgactttttaatgatcaccattctaactggcgtgagatggtatctcattgtggttttgatttggatttctctaatgaccagtgatgatgagctttttttcatgtttgttggctgcatgaatgtcttcttttgagaagtgtctgttcatatcctttgcccactttttgatggggttgtttgttttcttcttgtaaatttgtttaagttctttgtagattctggatattagccctttgtcagatggatagactgcaaaaattttctcccattctctaggttgcctgttcactctgatgatagtttctttcactgtgcagaagctctttattttaattagaccccgtttgtcaattttggcttttgttgacattgcttttggtgttttagtcacgaagcctttgcccatgcctatgtcctgaatggtattgtctaggttttcctctagggtttttatggttttaggtcttatgtttaagtctttaatccatcttgagttaatttttatataaggtgtaaggaaggggttcagtttcagtgttttgcatatggctagccaattttcccaacaccatttattaaatagggaatcctttccccattgcttgtttttgtcaggtttgtcaaagatctgatggttgtagatgaatggcattatttctgaggcctctgttctgttccattggtctatatatctgttttggtaccactaccatgctgtttgttattgtagccttgtagtatagtttgaagttaggtagcgtgatgcctccagctttgttctttttgcttaggattgtcttggctatgtgggctcttttttggttccatatgaaatttaaaatagttttttctaattctgtgaagcaagtcaatggtagcttgatggggatagcactgaatctacaaattactttgggcagtatggccattttcacaatattgattcctcctatccatcaggcttctctgctgcaggtctgctggagttcactggaggtccactccagaccctgtttgcctgggtctcaccagcggaggctgcgtaacagcaaagattgatgcctattccttcctctggaagcttcgtcccagaggggcacccaccagatgccagccagagctctcctgtatgaggtgtccgttgacccctgctgggaggtgtctcccagacaggaggcacgggaatcaggaacccacttgaggaggcagtctgtccattagcagagctcgagtgctgtgctgaaagatctactgctctcttcagaggtggcaggcaggaatgtttaaatctgaatctgctgaagctgtgtccacagccaccctttcccccaggtgctctgttccagggagacaggagccctgactggggctgctgcctttctttcagagatgcccagcccagagaggaggaatctagagagacagtctgactatagcggctttgctgagctgcagtgggctctgcccagttcgaacttcccagcagctttctttagactgtaagaggaagactgcctactcaagcctcagtaatggctgatgcccctcccctaaccaagctcaagcatcccaggtcaacttcagactgctgtgctggcagtgagaatttcaagccagtggatcttagcttgctgggctgcttgggggtgggatccactgagctagaccacttggcttcctggcttcagccccttttctgggggagtgaagggttctgtctcgctggcgttccaggcaccactggggtatgagaagaaactcctgcagctagctcagtgtctgcccaaatagccacccagttttgtgctcgaaacccacgaccctggtggcataggcactggaggaagactcctggtctgtgagttgcgaagaccatgggaaaagcgtagtatctgggccagcatgaactgttcctcatggcacagtccctcacggcttcccatggctagggaagggaggtccccagccccttgctcttcctagatgaggtgatgccccaccctgcttctgcttgccctccgtgggctgcacccactgtctaactagtcccaatgagatgagacaggtacctcagttggaaatgcagaaatcacctgccttctgcattgatctccctgggagctgcagaccagagaacctcctatttggccatcttgccagctgctgtatattcacatttcttaaaggatgtgcaatcatcaccatggtcaatttgaaaacatattcatcttcttaaaaggaaatatcgtaccatttagctagtacaacccgacattccctttccaactccctaggcctaaacaaccactaatctacttttttttctctatggatatctctgttctgggcattttgtataaatgaagttacataatatgtggtcttttgcaattggcttctctcatttagcttaaagttttcaaggtgtgtccgtgttgtagcacgtatcagtaactcattcctttttatagacaaataatattctagcgtcattcctagcatcaaataatgttctagtatatagatataccaaattttgtttatccattcaacagttaatggacatttgggttgcattgtaaataaatgctgttataatgctgcatatccatgaatttctgtaatactatattagataaatcacctttcattaatataataatgctgattatctgtgtatgaatttctgtgtggacatatgcgttcatttctctttggtactaacctaggagaggaattgctgggtcacatggtaactctatgtttaatcttttgaggaactgtcagaatgttttccaaagcagtagcaccattcacattcccaacagcagtgtaggagggttccaatttctccatatccaatgtgtgttattatcagtcttttttattctggccaacgtgggtgtaaagcaatatctcatggttttgatttgcatttctctggtgactaatgagacagagtatctactcctgtgcttattggccattcttatatcttccttggacaaatgccttttcaaggcctttgcccactttttattggaataattatcttttcattgagatgtaagggtttattacttattctggacacaaggctcttatcagccacatgctttgcaaatattttcttctatgtgatgtattgtcttttcactttattgatggtgttctttgaagcacaacaattttgaattttgttgaaatccaacttaccaacttttttgttgcctatgcttttggtgctatatctaaaaatcctttgccaaatacaaggtcatgaaggtttacccgtaagttttcttctaagagttttatagttttagctcttacattttggtctttgttccattttgagttaatttttgtatatggtgttagataagggtccaacatcattcttctgcttatggattttcacttgtcccagcaccatttgttgaaaagcctattcttttctcattgaatgatcttgacacccttgtcaaaaatcagctgactttagatatgtgggtttatgtctagactctcaatcctattccactgatttatgcatatatttttgtgccaataccacactgtcttgattaccattgttggatagtaagttttgaaatcaagacagttgaatcctgctacattgttccattgttcttctttttcaaaattgttttggttattctcgttctcttgcaattccatttgaattttataattggcttaacaatttctataaagaagtctgctgagattctattggggattgcattcaatctgaaaacagggtgggagcattaccatcttaacaatgtgaagctttccaacccatgaacctggaatggctttcctcgtatttagacctttttaaatgtctttcaataatattttataattttcacagtataagttttgcagttctttaaatttttttctatttattttatcctttttgatgctattataagtagaattgttttcttaatttaatttttaaatttttaattgcatttgaattttagaatcagctcaccaaatataattgatttttgtatattaattcttgctgaatttctttactagttctaataggcttttagtggattccttaggattttctatatacaaggtgatatcatctatgaatagatatagtttttatgttcttttcaaatctggatgccttgtatttctttttcttgcctaattgtactggatggaacatcctgtataatgttaaatagaggtgttgagagcagacgtccttgtcttgttcctgatcttagagaggaagcatctaatatttcactagtaaatatgatgctaggtatggatttttcatagttgtcttttatcaggttgagggagttccccttcatcactagtctgctgagtgtttttatcatgaaaggatattggattttgtcaaatgtgttttcgattctaatggctattatttggtgaagaatttttgaattcatattcataagaaatattggtctgtagtttttatttcttgtgatatctttggttttggtatcaagggaacaccggcttcataagaagaggccagtgttacctaccttacttttctattttttagaggagtttgttaagaattggtattaattcttctttaaatatttggtagaactcagtagtgaagccatttgggcctgggcttttttgtttgtgaataatttattagtagtagtattaatagatcaatctcttcactcattataggcctattcttattatctatttcatattgagtcagtttcagtaattgtgtctggggaatttgtccatttcatctaaggtgcctaatttgttgtatacaattgttcatagcatttctttgtaattttttgttgttgtttgtgtagggtcagtataatgtcccttctatcattacagatcctcaaggcagacaagttcccaaggaagcgaagctgtccccatagatgagagatcaataacaatcatgacccaaggaactgatagcagataagttgtttttactcaagtgttttattctaacccttctctgtttggggggactccatgagttccatgtagaatgtaaggctccactgtcaactgagttggtgtaattttcctggagactaagctgaaaatacctattagattcttcaaaatatacacaccctctgttttggcaacatccttaccagaaatttaagatttggatatactttttaaaagtcaccaatattcatgtacaaggatgtccacagaaatattttgattaataataaaaagtagacacaaccaaaatatctatcaatggagggctggtaaataaaggtttgtacaacaatacaataaaatactatgcagaattttgaaagaataaaatagtgttcactaaaaagcatgaggtatatgctggtatagaatggtatagaatgatctcaaatttttatcattaaatgaaaaggtgcagaagtgagtagtatgatcacttttgtgtacgtttaaaaaatacatagatggatgtacatatgtgggcaattttctttcctggaagaagtcataagaaactatgtcttacggttacctttggcaaaagactatgggtaggtgggaaagaggctttcagattgtatttttccctctagatacaagataggatgttataatcctagatatatggtttttttttaaatgccaagagtgttacctgggtagggagatttaggggccgtttttgcttttcttctttattcttatccctattaatttttaatgaaatgttagaaaagtttatgaaataaaagtgtatgttttcaaagtaccagctcgtgaaataaaattcctagttttcttaatctcacatgcatctcatggccacctgtgccaccttaaaactatctgagtcaaaagcagagtagcagtcactactgaaaacctcagaaaagagaagtccttccgtcacagacacccaaggacagaagagcacaaggtacctgaaggtggctttatgctaggcccttgctactcaaagtgtggtcggtggacaagcagcatccacctcacccaggcactaattggaaatgcagaatctcaatccccacctgggcctaaagtttcagaatctgcatgctatcagattcccaggtgattcactagcatgttgaagtatgagacctcctgcactagctcagaggtgtcatccccagttgcatgctgtaatcaccagaagtgttctttaaaccatgatgggtgggtcccatcatggaaacagggaatccaaatctctaatgggaattcctgcatgggagattccagtgtgcagactgatactgagaatcctgcataacagtcaatgtctctcctacatgctctttcaaatatacctctgttgtaacatatgtgataaccactctaatctatagagtctttctaggtactagtcactatgctgaacactttatccatataacttccttgaaatcccctcagccctatacccttgttattggcatccccattttatagatgagaaaactgaatcttagtgtttacgtaaccttttcaggcccctatggctggtaagcagcaaaggacaggctcaaacccaggctctcatttctatgctcttaaccttattataatatagtcacttgtttacttgtacctctcactaaaatgtgacctttcgatgttaagatatatgtcattacttctttatctttggtacccaattcaaaatagttgcacaataaatattaaggactatcaaccacatcatttgcttgttattttgcagacacacaacaaaaggtcgacgggtaaaaatatggacgcatgagacacaactcagaaaccctgagctgggtgacaatggtggccttttctctccttcaggatggcattaggagcttagttggtgccaaccaatgttttatctgcaagtgtggcctcaagtcaccatcattcagacctttcaccatatcatacctcagggtgagggatctgagatgcttctgccaacattcccagtatatcagggcagctcatgacatgcctccatgttttccatgtgggtcatcaaacaacagagcaccagagagggttgaactaaatgaatactcaagtgccttccagtccatttacagcctccatttcagctgcaattcccaactgtctccaattagcaaacctttgcacagacatcatgaaggcatcatgtgctccctgtagcttgtaaaacagctatgattttggtgccttagcaccatcttgtaacccaaatctccagctcaactttgctttccactgaagctcttcatcctgctccaacaggcaccttgtacccacacccaagttcccacaaaaactcaagagagaccagtgagttactctgatgtttattttaatgcatcttagtccacacagttggtataaaatcagaaaatgcaaagcaaaaacaaaaggtctggagtcttagcatcagaagggcaccatatatacatctacagttggtggccaatacaagtcattgccagacagtccttggaggcacagaacagcctagacccagccaagctctaggaactcacggtcccaaggagtctagacgcttgttctgatgctccgaccgtaagaaaaatgtgggagtgatgaaggctttatgatttactcattatagtaataatagcagcctagctaggtacaaaagcagttataaaccatttatattacacagaattattcaggtctccattctatcttatgttgtaaaattgttaattggatttccagtgagttgtttagatgattagtgataataaggaatggtaaatccatagcaccatttcaaagacttgttgtcactgatttctcatttagatgtgtgacgaagatactccacctgtaagggcaagtatgccaatgccacaagccgtgtttttgcaagggctccagtttgggcattttgtccgtgtgcgcgtaaagcttcacacagaggttcgggcagcggctgtttctgttggatgcactgggtcacccaccagaaaagggcttttggacatttggggtttctacccacactttggttttctaaatgaggtggactgggagggaggtatcttctttcagatgaaagggaaggggcgagatggagttatcttatttctgggtaaaacaaaacaaacaaacaaaaaacaaaacaaaaatactgagctggattatactgttaggatgtaaagttccttagctacttctttaaggctcaacacgaggctgatggtcaacataaaaagcaaacaatactatgtacatatatgtaaaaagtgttataaataggttttataaaccggagatattatatacatcttcaatcaacagcaacccccacctccactgctttctgtttggtttggtttgagtttgggattttgggctagctcttttttctttgtctgctttctgttttcccttcctcccttccctatgtacgctcagagcctcagacagaccgtctgggcgcctcattcgcgtttccgcaagatcacatagatgacaccgctgagaagggccagggggaaggccacccaggccaggatgtaggcgaaaccgtaggagtaatccgagttgagatgccactccgggtgcctcaccgtgtagatggccgcagcactcatcacgcacagacctggggaaggagagggacaagctgggtgacggagagtccatggcagagcggccccctctccgccaccccggatgctgacaattgctgggtaggaagaacatttctacctctggaaggaaatctgcttccaggtccagaattgaaaggaggtagcacaaaaatatgggaacaaggaaaacaacttgctctctatttccaatcttggccacctaggccttaatacctgagggttttctttacattttctgccctatttctctttctttcactgtcaccaattcccaggccacactacatggccagcaggcattcaggctgcaagaaaaacctacctgtctctttccaagggtggttgggtatggaaacccctggaaatctatatgccactctacaagtgagtggtggcattacctaaagccaatggaagtgaagtgacattttaccattattggagtcacgccatggtaaaaggattaagctccatgcagaccacaggggcctatggtccccctaacagagttgccacataccaggtgaagcaagcaatgcctatgggcactgccaaacagacaaagaaatgtgtggagagggaaaaagaaagtgaggaataaggatgcagccgacagtatgactgggaagccacgctgcagagggggaagatgatcaaaggcaagctccatttccctgggtgccccaaggttgcatttgaagcccaaagaaggctaaagggcactggatatgcaggtgggtcaggccaccctccctggcccaccaatgcagcccttcggtgttggaaagagaagaaaagcctccatcttgggccctgtggagcagccacgctcaaactgatggccccagctcacgtgacagacagcgtccccccacaaggaggggtccagtgatgtcagcaccccagcctggagctgcacaaagcctggtctgtttcctccctgaaaacagggtctttgagaagctctgagtgactctattataaatccagtatgccgtgtgggattcatgcagttccagagttcccaatgcacccgcgcccccccaccgcccggccacctacatctaacctcactgctatttgggctgctgttttactggacactgcaactttgtttgaagacagtgcagaagtgggaatacgccacatgaaccaccctgttaagcctgtcctcctgcaactcagaggagaaaactgccacttgactggcccctgtcaagagagccacacaatagtcttggaaccaaaatgggacagcatccaggacctgccacctacaggaagttcagaagacagcaaagatggccatgtcaggagcgaaatcattgcgggttaattgttgattgcagaaaacagcagttttgatctgctggggacacactttatttgccttgaggtccaggatccttaattatcttgccccactcttccacggcttgcatctccaaagtgctaactcttgtctttaagaaatactgaagttgtctcttgggctctgtctgacttatctaatgaaggcagggctataaaaaaggaaacatgaccttggcagagagaaaggtgttaacagagtgctagcagggcaggacaacacttatcatcatgcaggcagggctcccaaatgggctgtctaaccagatctggcatgagaaatgcctcaggagctgagtggaccagctactccccgatttcactgactaagaggagataccagattccatccttgaacaagagggatagaaagaggcagtatagagaagtgcagcgactaactacacagcttaatgtgtatgactttcatcttagtagaatctcagaagtgaatgactctaagcttaaccgtgataagcagtaaacttagatatctacaaagccaaagagaggatacacactttatatgattgttgtcatgagactgatgttttagggaatatattattacaagattgtctgcatgtaaagcaatagatgtaccctgaaatagagaaaaggatgattctttggctgggttccctctgtctgcaacccaagacagttaatgtcatccagtagtcatctccaaaagccaaatacccctagtaagtggactgtgactcactttctcagcaaccagtaggtggagatgtatcaccaggtccctgtggcaagggtaagtgaggccctgaggcacaggcagatgttctgctctttggcaatgaccgggactccctggtaggggcctgagtctgggagcataggtcatctttaagcagaaggacactgaccctgtccagacaatacaaatgtgctgagcattcaacttacaagagtttctccctgtctcaggatgggtaggtctgcaacaacttcctgcaagttctgcctaaagcccttttgaagagaaagtcttaagctcctttaacagtgactgcaaccccatgagagtgattagagcccagagcctctggaaggaagcacccaaggggccaaggtcaaaggaagtagctgagggaattcccagtacatccttatcatctccattccctttggttcagtgaacatttaatgagtgcctattgcatgcgggccctgttctagctgctgctctagatgtaccaagataagtgagacatggctcctaccttaaggactgtgtgtctagaagacagacatttgcatataatttcaatatagttcgatggaatttcgagagagggaaggaaatgcaccagatgccccaagagcatagacgggcgctgagtccaaactggagaactggagaagccacacggactctcatataataggctgattagctcactaagggtcaggaaagagagggccttacatgacatgttaaggaagctgtgatgagaagcctctgaggaaacttcagcagaggagaaacatgatcagacgcacgttttagaatgatcactctggccatggtgcagaaaatggattcaggggcagggacaaggcaggtagctggaaggtgcatgaggaggcctttgcatagctgcactggggttagtgagtcaagacaaagaaatgggcgtaatgcctacggaggatgctacccaaatgcaggattcagtagaaggctggctgtggggtgagggagagaggagaggccagcatgaccgcctggtgtgttcactcaggcaagtgggaacacagcgatgtctcagaagccaggggaatagagcttcaaagagtaagtagctaacagtattgaaaggagcagagtgatccaacaaattaaagacttcaaagtgtactttggtaacctcgcaaaagcactttcatttgagagcctggggcagaagtcagagagaagttggctggaaagggatgtcagtgagaccaccagggtggtcactggaaggtgcagctatgatgttgggttgatgagtgggtgcctttttctccctcccacttcatcctcagggcaacaagggagggcaggaaggggctgtgaggcctgttcctctgaaagcaagagacttctctgtgtttctgtgattgaagcccactccttttacattttcagtatccaaatgaccattgctgcctagaaagccacccatagcattgactctgatttgggcatggccagtgagacatccataatcatccgtccctaacaaaaatttctaaatgtggtatttgacttaagccacctttgaatcactctgaacaggatggcactgaacttttattaatccccccccaccaaattctttttttttttttcctagagaggcagggtctcactctgtcaccaggctggagcaagtgcaggggcctgatcatagttcactgtagtcttgacctctcagcctcaagcaatcctcctgcctcagcctcctgaatagctgggaccacaggcgtgctccaaggcaccccactaatttttaaatcattttttgtagagatggcatctcgctttgttgcccaggctggtcttgaactcctggctttaagcaatcctctcacctcagtctttcaaagtgttgggattacaggcattcgccaccacacctggcccaaatccttttattttaaatgctctatagctatattgatctttctattaacaaaacaaatgaacaacaataacaaaaagagagagaaagtgaaactcactcaggagtcccctctattctttctgttcttaatcccggtaaccacacatttgacttgagtttgattctgccgaggaaacacaattatctaatcatccaaccaataatagttttattcaggctcctctatgtgccccacatggagcttgatgctgggtgtaagcagtaaaataaatcaaaacgtgcaaatcttccttttaggtctgtgtctagattaatttcttgatgttttccagtctagtgcaacccaacccaacagatcttgtcaaggaatagatggctataggttctgaaaataagaatgactccaaagtccagacgcaggatcaggatgttccttctctaagaaggtggtttagttatttctgggaaaatatcctagaaaaccttacagtgggattagggacagtttaatggctatgtcagtggttcccaaccctaaatgcacatcagagtcacctaggcagtggatccatcccacaactattaaatgagagtctccagggatgagacctgaatactgtcttttttcttttcttttttctttttttttgagacagtcttactctgtcacccccaggctggagtgcagtggcatgatcttggctcactgcaacctccacctcctaggttcaagtgattcttctctgcctcagtttcccaagtagctgggactacaggcacgcaccaccacgcctggctatttttttatttttatttttagtagagacagggtttcaccatgttggccgggctggtcttgaactcctgacctcaagtgatctgcccacctcagcctcccaaagtgctgggattacaggcgtgagccactgcgccccgcccactgtcttttttttttttttaaaggacctcaggtgattctgatgcacagctcaggttgaaagcactgaactaaaggaaggagccttttgatatgcattcaggaagcagccaacctaatgcaatcaagaagagatagttcctaactgtcagccttgtggctaagtgaggaagagataatttggcaaaccatggagaccccacacaacacacagagctgtaatctagagcaaggagacagacaactcccaaacctacagtcagctccaagagccctagcacctttcatgtgcttttcctgaaagctgatgtgtgccatccataaagatcacagctgggcccaccaagaggaagctgtgcagagataatgcagccctcacagccacttccggagactacacagagattctagtggtttccacttaaaacgctccagtgcattggagaggcatttgccgggcatgcacgcttgtagatttcacatcccatgagtgtggagctactttcttctaccttctgtttgtcagttttagcttttctgactacttccttgatgttaagttgtcacttgccaggttttcccaaaacgtgggtttctcatctccaacaaccctaatctacttagctctctaattactaacttcttactagtctgtgagtcagaaaaccacatgacaaaattgacttagaactgtcacacgataagggaaccaggaactctccaaatagagttcctaactctttcagttctcagaattagtggaaagatcctgcagccatttccagtgcaacatcctagagatctgaggttccctggagaccaactctcagatgatcttgactgggattaacaacggaggacaggacactctcaggacttacaaattacaactgctattacagctcagcatttcaaattcaagataatttcttattcaaatgtggaccaacagataactgaaaattcagtttcatgagacgtaagcagctagatgtaaaggggataaagaggacaaagtcatgcgcttttacattcggaattctgcacttccagcacagttctaaacatcttgtattgactttggaggagaatgaaaatagtgaagcaagagtggattagtaaatatacttaaatcgcaatacctaggagaagagtgtttggctgaactgaaatacttttaacacacagtgcagttacatgagtgacttaagggttcttatctctggactttgagttttggcctaaaatgatgtaatgatgttgctaaaaagacattgttaaagaacttaaagccgaaacagctcagcaggatgaatgaagatgaaggtactggctatcccaaggagcccattcaacagcagcttacctcttctcagctccatattttcaatgtgactgggtcttatagtacaggcttgtattcatcacagatgtttggaacttcagaataatacatggtgcaaatttgcatttaccttccattgtaaatcagttccaataaaagataatataaaaggcagagcttctgccttggattttgtgttctttaaattttttggtgcattctgtctttaaaatataagaagtacctcactatattcagtgtaacactcaaccgtccctgtcatgagctgggtgaccttggtcattcatttatcctctggtgggctcaaattattcatcagtaaaataacgagcctgtacaaataaaatgtaatttttttcacatcagatgggtaacgtgccaaatcataacaaggtttgagcgaggcacatctcacacatgggcatgaaaacccaatcatcgcttatgaaactaacatttcaatagaaatacattatgaaagttctggttctaaatccatattatcttgagggcatatccactgatgcaatggatatgatcattatttgatttgatatcaaactaaaacgagtgagaaaaaaaaaaagaaaccccagaatatgttacagttgtttttattccaactgaaaattgagtaagggtaactcttcactttaacgtacctagaaatgatatctccttgcataattagtcatttaacagagccagcaaccatccaggagcttggcttggtgtcataagacatgtgtaagtagcaaagcactgtctggttttgaaatctcaaaaccatgagtattgaaatgttgtatttgagtgtttaatgagaagtggttaatcatttacttccttttttcaggaaaggggaactctctgtcttctagacaaggtcaccaacatctaaccttgggctgtgtcttcccatacaaccctatttacgtcaaccttccaatgactgctcctggggacagagtggtgaaatggtaccatgggcattctgacaaccaactcagagaagagatgctacatcctttgccctctcagagggtcagaattgagaacatctcccagtacctagacatactctggtacatatgaagtttgtgatctatgaatttggaccacagaatccaccactacatctagctcttacttctctccaatgccctgctggttcagtcaacagtaagtcaacagacagacatgtaagagctaatgtaagatgctaggcagaatgcaagatgtaagatgtaagatgtaagatgtaagcatgtaagatgctaggcagaatccagagacaaagttggaagatgtcaccctgtgtaacagaagtttctaggactctgcacactatgcatattaataacgtatttaaagagggaacttgaagacagtttaggcaggagattaaggagacctctcatgtgttttcatgtgttgtcatagccccatgtttggaaatgacaatatgtgacacaagagtgtcaaaatgaagacaccagaggatgacaacagtcaatcaaagcccagtagaatctaggaactggaagcaaggaaggtgagaatttgtcagtgtggcttcatcactacctattggtggaagacacatacctgataactactttgctagttcttagcacatcagggccattttctggaggcataatgtaatctacagaaacagctctcaagcctgacctttgctctacagatagcctcagtattcacctctgattatgtgtccagattgcagtttcattcctgttgatacgcctggcttgggtggggaccttccttccagatcctctaagttctctttcatatgcatctcattccagggagaaggggagagttctaagtcccaagttctaagacacatacaggtacacacccacacatacaagcacccaccctcactttatggaaagcatccagtggggagactcatgaacatcagtcattctgaggccacatccttctactaaactaatcattccgcagacttggatgcaccccgcttccacatggactttaccatccacaacttaccagcaagaatttggaagattccagtgatgtaaaacctgccccccttggtgagggtgaagagttggcagaagaacaggaacagagacagaatgctgaagatgatcgacaggatcatggtggcctggacagactgcagccattctgggggaaagagacacttggttaggagagctggccatggccgggggagggctctgcctcgaggtgcagggcctgaagggccatgactgctgacagcacagtcctcacaggcagcagaagcagaagtcctttttccttagcagaactcagacaattcacttttgcaatctaagaagacattctttattgtttattttggaggaaaaaatatatacatatatacatacatctatatgtactgatatatacatatacaaacacacacatgtgccaatatgtacacattacatacatatatacctatatgtacaaatatgcatacaaatatgtacgtgtttctatatatatgtgtatatacacatatacaaatacgtgacacacacatatatataaaaaacacatgtgaacattcagggaagggctgtaaaaaaatatctatagttccatcactaggagttaaagtcattttaaaatatattgaatttccttccagtgttggtgcaaatgtgttacttatgtacatgtgtctgtgttaaagagggcctgagccctgcctactaccttccctcttcttgccctcaggggtctttgaagggcttatcagaacttctgtattccaagaaaaatagcttaaaaccactattcaaattatctgcattccccaaggagaggtaaagatcacgggaatggctgttagagcccaaagtaattttttggaagaatggaagaaaatactgatgaagaaaggtatgctctctataggtatggaaatcaatttgcttggacaacccgtatttttttttttttttttttttggtcaactctgatcatggccattagcctcagcacagagcggtgtgtgatcgccaaccaccagacgggatgaaggcttacacttccttatctctgttgaaccccaaatctccaagcttccaactgaaattcaggcaagaagacagagcctcctatggtttcttcagttcaccatccgctgcaaactcatgtcatttcagggaggaaagaagaaacaacctgagttccacactgtagagggaagcccagggtaaaaatctgcatttggcctctgtcttgtcttccaagtgccacagaatgctgggggcaggcactgctctcatggaggaagggcaactggggaagctgcagcatttaatcctttcagctcagtaactgccatatgtaatggcttcaaaagcataccttcaatgcttcacccagtactcacagctctgaaatctggatggtttataattagtaactgagtaagataaacttgttttgagttgtaagcagctcatggcagaattttaagggtgcaaattaggttaactgttcctagattttcacctaagatgtttccaaggcacagactggagatattttagagttggaagaaacctgagagatcaactagtccagctcctttgcactgaaagagatttccagaggtgttttcatgagcccaaatgacacagccaaatctaagaggcctttgattctagtctagcactcttcacattcaagcacaacatatgcttctttcattttttcaatttctttgtcaattaaagtaagaaaatgacggctaatgggttgtgagccatcctgatttcactcttacataaccttaatcaaatgtttgtctttatccagcatagaggttcttctggaggagcactttgcaataaagataatgttctcataatattgtttgcttaaaataaaaaaattatctagcactttggtagatgcagctggaattacaaagaaatctgagactcaaatctgaaactaaaacaaataaagggattcactttggctgggaaatgtccttccatgtgcatgttcatgaggagtatggctggtggagacaatatcttagatttccttctccaatcctgagatactgtcttcacccttaaccccgcgcccctgtcattttcagcagaaactactacgagacctcacatacacagaaaacttaaaatctttatatgttaaatctatataaacagaaagtgtctaatatttaataatataacctaaatacttcttgaaacatctttcaacattaacttgaattttagtcccaaccccattacaattgagctctttgccataagttatttctcgaatcaaatcagaattagaggatcaaggacatttttattcaatgagcatttgttgaatacctactgctttgagccaagccctctggttgactctgatgatccagagatgaagaagatggttttcaaccataagcacaataaataaaacacatgcattaagatagtaagtctatcatcaaccacattatatgtgaatgggttcaaggcactcataagatatggaattttatctttgattaagacattttgggaggctgaggcaggtagatcacttgaggccaggagttcaagaccagcctggccaacatgccaaaaccccatctctacgaaaaatacaaaaaaattggccaggtgtgctggtggacacctatagtcccagctacttgggaggttgaggcagagaatcgcttgaactcaggaggtggaggttgtagtgagccaagatcacaccactgcactccagcctgggcacagagagagactctgtctcaaaaaaaaaaaaaaaaaaaaaaaagagagacattgtagctatattctaatataatagatacacctaaaacaagcaacagtcaaaaacaaaaaagattctgaaaagaagcttcaggcaaatgttaacaaaaaagaaagaagataaattaataataaaaaatagaacttatgttgaaaggataaaagtggccagagagttgtttggttgtttcatagaggaaagatttggtttatttgatctttacttctggtttacatgatctatgactgaagaaaataaatcattatgcatataataacatggcctgaaaaagttaaaatcaaaaagtaatcaaaatatgagaagaaattgttaaaatcacaataacagtagaagactttagcttccttcctcaaaatagatgtcaggtagaccaaaaagaagaaagaatatagattacataagaggattaacaaatctgtcctaatagatgtatagaaaacttgtgtctatatagcaaagttattttcaaacacacatgggacagcttttcaaactgactataagggcaacaaagaatatctcaataaatatagaagcagaaatgatgtaggctcaacatatacctaaaggcaaacagaaattagacattaaaaacaaactagccaaaataaatttggaaatttaaaaacagtgttccagataattcctcggattaaaaaaaacaagatgaaaagtaaaaacttcttcagcaaggaattatatagagagccacatggcacacctgtgggttgtaaccaaagcagttctcagaggacaatgtatacacttctaagcatttgctagaaaaatccttaaaaagagtgaactacactttcaactcaagaagccagaaaaaaaacaatgaaataagtccaaaaattaattgacttaatatggataaaagcacagactaatgagacagaaaaaaatattaaaatacatttaataaaaatgtctggttctttggggatacatcaacaagttagacaaattttattcaagtacataaaagaagtactaaagaaacatactaagttcctggatagaaacactcaaagttataaagatgccaatttcatccaaaataatctacaaattcaatgctgtcctaatccatattgcaactggaactggaaaaaaatcaattaaaaattcatctaaaaaacaatgagcaatgacagataagaaaaaatttgaagtaaacacaacagcaactaaaaaccaaaacgaacaaatgaacaaaaagaaaatcagaaaaacatataaaaccaatgagtcaagataccacctaccagatttaaaacatatttctatattttgcttattacagtatatggtataaattaaatatacaattaattgtaactttataatatataattatagaacatatcatagaactatgatatatacaatatataattatagaacatatcatagaagtatgatatataattatataatatataattatagaagtatatatgttcaagtgcttatattataattatataacatataattataattaataaaatgtattttatttatagacatacaaagcttatatttatattataaagttttagcaattcaaaaatatggtgttaatcatgaaagaaaaataaaagaatgggatggaataagactttggaagcatacatgtaaatttggtagataatacacaacatcatataaaccagtggggaaaaatacaacagacaatacatagtgttggctattcatttggtaaaacataaaattaaatctctagttcgcatcattaacaaaattaaattacagacagaacaaagagaaaacagctaagtataaaattgaaaagccatgtgattagcaaaggagaaatatgaacagccaataaacatcgtaaaaggtgcccaacctcactagcaaccaaggaaatgcaagagaaacccatgaggagggtgacaccaattttcatccagccaataggcaaaattcaaaaaaaatggataatatcagcagaacaaataagtgatagctacctgcagacaccattcacaggaataataataatattattattataatccttttgtgaccagccattttgtggcagaatatattaggttgatacaaaagtaattgtaatttttgccattaaaagtagtttaaaaattgtaacacctctagcgtaatgacactatatgtgttcaagtgcttatctactatatcctggaaaaacagtgaacatatactcagaggaaaataaataaggacattgattgtagcatttctatgagggaaaataaattatggtatatcctcacaatgaaatattttgcagcagttaaaaaaatcatgagttagaaaatgaagagtctttgaaaggtctccaagacaatgaaaagagtaaggtgcacacacaacatgtcatcattatgaaaacaaacaccaaaaaactatgtaattgcgtatagacatccacaggcatgcaaatattcgtagagaaagagccaaagttgtgtcaaattgatgtcagtgggttcccccaggaactactgttgcaacgaagaagagtttggtcaagaagcctttcagttgaggatattttcatgtattataatacttgtattacttaaataattaaaaccaatttaaaagattacaaaggtaaaaacagatgcagcactctattgacttactaagagtcaggattccaaaactcaaagggctagtggaattctgggcaggactgggcttccacatgcccaggaaaacaacaagggattttcctttcctccagtgccattgatcaaaagctacacaaggacagcgagaggaaaaaaaacagagcccagcccaggagaaagcaaactccattccagctccaaaaggctggtgcaagattcaagagctctcgttgttgctcaaagggaaccccacagggccctgaggacatttctaagctcagatgatgctgctccccaatcagagccattcatcagaactggaatagacaggtaacaaccagcgcagtaagagacagcagatatcacacactccagaaatgacagggctttgatcctgtccaaggtaagggtcccgtgtgagcacgtgcaaagcctgactctctccagcatttatgtgctctggttaggacagcccaggcagggctgggctctgttgccaagttcttctgaccgcccacctaacttgccacatacatttttttggccttgaattctgctttacgtacttgaggcactaatatattttattgggttgtcataatgatcaaacaaaagagttgttattgaagcgctgttaaaggatagtgcaaataaccccacctaaaaggctgatgtgagaaaacagggtaaacaagcatttacaggctgttattgaggggccaggttctggagcatttccatctgggtcacaccaagcagtatgaaaatgggagccacaggccgggcgcagtgggtcacgcctgtaatcccagcacttgggaggcccaggagggcagatcacgaggtcaggagatcgagaccatgctggctaacacagtgaaaacccgtctctactaaaaatacaaaaaaaaaaaaattagccgggcgtggtggcgggcgcctgtagtcccagctactctggaggctgaggcaggagaatggcgtgaaccctggaggcggagcttgcagtgagccgagatcgcgccactgcgccactgcactccagcctgggcgacagagcaagactcgtctcaaaaaaaaaaaaaagaaaaaagaaaatgagagccacaatgttcacacaagccaggttattagcacattggccagaactccaaaagtgttttgatacaactttggtatcaattcatatctcctctccagcataagggtgctacagagtcagagtgcaaatatctgcacagatagcaaactatctataaagaatcagagagcaaatactttaggctttgcaggtcatacggtcttcttaacaactactcaattctgcctttgtatcacaaaatcagccatagccatggacaagatgtaaatgagtgggtgtgacccattccttcaatagccatttatccaataaaatcttatttacaaaagcaggttggattcgacatgcaagctattatctgccaaactctgctacagcaaaacaagtcagctgtacagaaaataatgattcgagttcagagaaatataatgcaagtgaaaatgctgtcaattacaaacctgttctatttagatcaaacctagtgtgacaccaacatcccaagtggctaaactatagattaacacaagccccagtgtggcgatactcttccccacgccccacccaatttgcaagtatgcaataaatagtagaacttatgttgagtacctgctgtcctccaggccacactcagttcctggtgcaaagtggaggcctgctaaacatttgtggagtttccagtggaagttttaagccaatatccaaccttggtgctgagcactggaattaaaaactaaagctctggccgggcgtggtggctcatgcctgtaatcccagcactttgggaggccaaagcgggtggatcacaaggtcaggagatcgagatcatactggccaacatggtgaaaccccgtctctactaaaaatacaaaaattagctgggtgtggtggcatgtgcctgtaatcccagctatttgggaggctggagcaggagaatcacttgaacccggaaggcggagactgcagtgagccgagatcacaccactgcactccagcctggaaacagagcaagactcgtctcaaaaaaaaaaaaaaaaaaaaggccgggcgccgtggctcacacctgtaatcccagcactttgggaggccaaggcgggtggatcacgaggtcaggagattgagaccatcctggctaacacggtgaaacctcgtctctactaaaaatacaaaaaattagctgggcgtggtggcgggcacctgtagtcccaactacttgggaggctgaggcaggagaatggtgtgaacccgggaggtggagcttgcagtgagccgagatggcgccactgcactccagcctgggcgacagagcgagactgtctcaaaaacaacaacaacaacaaaactaaagctaaagctctttgcaggcctcctgttctgagagtgtccggtataagagctgctgacagctttctgacatgggccgtggcagcacccagacctagctcccccagcagatagtgggaagctcgagttgcacaaagatcaaagctcatttcaaggtcagattcctgctgtaggagcagctgagcaatgaaggaaatacatcagccccctcagctatattcttagcccagggcctacaacctagtgagttaagggctcagaaagtatgaagcacttttcaatgtaacagtttatgtgcatctttcattaccagcatggaaccaaccctgccccatatcaagtcccactctgggcaattcataaaactgttctgactcaagagaacaggttttgttgaaagtgaaaggaaggacagttgcaagagtcagaagagaccttggagaggccaagagagaaaaagccatgagagggtaaatcacagaggcaaagagttattaacacctcccatttgcatagtgctagactgttttcaaaacacatgaccccaagaccaggactcccacgcccaaacctcccaacccacaaccatcacacagatcgccattttccttatttctcagtatgaatgtcattccagaaatagctgagtctctgaaaggcctccatcctaaacaatgtggcctttgcccatatgcttcgcccaccagctcaaacatgcccaaagcccagcgtgggtcttgccccctgggcttcaacttctcccccagctggtggctttgaaatgggcttgctggtcaggctaactttgcctatgattcatgcggaaagcaaaacagatggagacaactatgtgccagcatggagctcacaaaggcgatgaaggtgacgtgggcggctctctcaacaggtaatcctgggggtattttagctagagcaaagcctgtgtctggccactagtgggcacaaactgctcagtaagtggaaggaatcttcatgtcaaggtattccagctaactttgatacagttattcaatgaactgcattcctaattaagaggctttgtggcaggcacagagctagtttgtcagggtctagttctgcactttgacatccatattcttgctctgctagtgagtttttggacttctaaagggaataacacgcagccactgaggtacctgaggttactggataatagtaagctgtctgaggcttttttatacccttgttggaaaactctagaaacagggaaacagagtaggctttgtttctctaagaattgctcttggaagacttactccaccagatacaaaagaaaaaggaggggagtgcattgtacgatgaaggatatcaatctccctccttggtaattcacaatgtaccatgaatgatcaaagcctgcttaactttcaaaacttagtgtctttcaaacggatttatcaggagacttgtttttgtttttgttttttaaaagaagagctcacttaaaaacactgagtttggccatagaaaatgacgggaaaggcagttgcaattgcagtcatgaactgcatcagtggagaatgaacagggaataattcgcttagttttaagatcttcaggtttaggaggaattctccccatagaaataatagagttctcctccttctttcccctaaagtatgaaaaaagaacacgcattatggaaatgaagagctagaacaaaagagctgctacccccaccagtgacagtaaaccaatgcccgtttacaagcacaaaacccatctctgctccctctgcctactgcaattctaccccattgccaaggcccagctcagaggccacctccttttaggatccctcgatgccacaattacatcctgaacatgaacagaggctccgggacccatgcaatgtgcaggtcctacctcaacttcaggtcctacctcaatgcctgctctgcttttaggaaaccagggtacctgccccaggttacctaatttgttacaggcagacccggtgcagaaaaacaaggattccctgatgcccagactactagtttttccactacaacacactgggggtgcagagaagtcaatgatatgcttgcaatctaatgaattaaattattctaccaccattcttcagacttagaatccacaaaaactagagagggtggaaggagaatggtgtggcaaagagagagcggcttcccttattctctgctcatcagcctgccaagccaaaccactgaccaaacttcagaagggcaagaagaggccctgcttatgcagctgggaccagcaccagagaagccactgaaagaaggaaggaaagaaaaactgcaatcgtcaactgtttgaagagtcatcgtgtagaggagagacgggggtcaccctgcagtcattgtccaggaggcactgtggagatttaaattctttaaggacgtgccaagcaacttgataaaacccaagtccagcacatcaggcatgaatgaaggcaactagaagtgaatggacaaaagaggggcagtgttgggtttaacaaggtaatttctttttttgagacggagtctcactctgtcgctcaggctggcgtgcagtggtgcgatctcggctcactgcaagctccgcctcccgggttcacgccattctcctgcctcagcctcccgagtagctgggactacaggcaccggccaccacgcccggctaattttgttttgtatttttagtagagacagggtttcaccgtgttagccaggatggtctcaatctcctgaccttgtaatccgcccgcctcagcctcccaaagtgctgggattataggcgtgagccaccgcgcccagccgaggtaatttcttaagtgacaatatctcctggcattcctccctcatcactggctgttcatccccagtctcctctccttcctgtaccctcgttaacccctggcatgcccaagacttagctctgaaccctgttccccttttctgccttctgctctcaactcctccccaagtaactgtattcagcaccacaacattgaatacccttcggtatagaggaatgactcttgactttgaatttccagcccagacctctcccctaagccaaagacttctaaattgaagtgatttgctgacctctctgatggtcaaaatataaatcctgatttctacaccttcccgcaaatcttctgttcctcctccagtctccccatctcagtccaagattcagttacacaccagttgctcaagcccaaaacgtagagtcatctagaatcattcttccctaactccctacatctaacccatcagcaaaccctgtcatgagacctgttttcttctctacttcccctccctagctaagccaccagctacctcctagagttcttgtgaggattaaatgcattgcttttcaaagaatgcctggcacttacgtgagctgtttgtattcttaacatcattgtcattgtcatcattgtcatctcagtgtcatcatcatgtccagtctggactatgaccacaaactcctcactggtccccagtttccactcttgcctctccccagaattcattctcaacagccagaatgagcttacaaaacatgaatcaaatcatgacactcttctgcttaaaacccttcaatgatgtcccaactgtccttctcagtaccacagcctgtgaggcaccagcgatcctgctcccatccctctctcccgcattccccaccctcctttcttcagctaactcagggccttggttcttccctttacctcctagaattttcttcccatggttcttcctataactggtccttccctgtcttctaaatctcagaccacatcactatggaaggaagaggccttccctgagcagctcattcctccagtgatgactttccattggatcaccctatttgtttcctgcagagcatgttccactacccatagtgatgcatgtattgtgtattgcctgtttcctccaactccttgtgagctgcacaatggcagggacctgctctttcttgttcatctctgtgcaccccatttctagaacagtgcccagtacataggacaggctcaatagagttgaagaacacatgaatggatctcactattagctcttcaaaaacaaaagaggctctcttgaaggtaataagttccccatcagtggtaggatgaacatgtggtaggcatattgcagaggggtctgtggctcgatgggataggaaggagggatgggccagatgactccgggtccctgccagtgttgggggccacttgtgtgtggatgactgcacactcatgtggcccccagcactggcagggacctgaccacagtcagaaggcttcatcccagacagccttctctcgggcaccaaagatcaacatccacaacctcaggctgcaccatggccagtccctgctcctgaaatgcaagggatgttttcttggtgctggtgaaatcttggggatacaattgaagtttttttaaagcaaagactatagattccaggtcatacagttcagacacaggttcaaacaaacatttcatactaattcctgggtattggcatcagagaaaccctaagggttgaaatcctggcatgttgacaacacattccgtcctctgtacctcccttgtaccaccagggtctcagcatctcataagagcctgtaaaatccagagccattccttgggtagagattatgggttggctgagggagccacgaagattttaaaatgtaaaacatgaacccataaatgcagaaggtctcccgtgttttctaaaatctggccaaaagctgagccacagacaaggaaattgtctggtgtccttgccaaaatgacagtgtcaccaaattgataaacaagtctgggatcgttttgaagacagcgatgataggagaccaccaagggctcaggttgggggctgctgagactggcaagatttagtttctctaattttcaacccaaagcattgatctaattcctcacacaacctattgatagtcatgagtttgctgttgctgctgctgctgctgctgctgctgctgctgctgctgtttaaatggaaaagaagagtagtaagtggtcatcttctcagcgtctggtgctggtcccgcccacacactgtggcagagcagacccacctgttgtcactgggaaatgaggggctgcaggtactgcccttagacaatggaggtggccaaggacgtttggggacagattacaggaaagctcaacaattcccttcatgctttggtgttgagcactggcctcctttttaaaaacaaaagtgattcaaaaaggggcacattttttgtgcctaacacctcagcatgaaaaagtttatcaactaccttttcttctgagacaagagaggactttgtgagcagggacaggccctgagagacagattttactgaagacaaactgcctgggtcctgcctcatcactgaagctgatgaagaccagccaggggccagggcaagccaggactgtgcccttctagctcttgggctcccaagccgcctgtggcttaattccagtattctgacccattctgctacacgtcaggtccacacaaattaaacaaaaagcaggggaatgcttgtgagaacttggacttgatatttggatcttggagacttcaaaacaaaaagcactggttcattcaatagcagggcaaatgttttgcctgaatcctttgggtcagtagattttaaactcacccatagggtcttggggaggaggcttggcacacccctccccctcaccagagccttccagattgtatgagtttgcaaactaaagctccaggaactggcctcattcaaagcgacgccatggaccctgcgtgccatgccccagggctccactctcttaatcaaggcagagggaacctacttactactcaaaaccaattttctaacataaaatgttcacagttattttctgattgtgaaaataaaagatctcaatgaggaaaacaggtaaggcagcaaaagaaagaaaacagccaaagtgataagaatcccgtcacccaaaataatcactgaaaatataccgatgcatttctaccttgtacaatttctgatatattctgccttatagaggcttctggactgtcactccaacttggaatcaaatggaccactgagaaacccgtggaagacagcaggtctaaggaaatcacaaagattagaaatgcatccatgtgcacccaactccttcctagtgggggtggggggtacctttgagatggtctgtgattctacttacccctcactctctgttcccactagtctgccctgccctctgtccctcaactacgccaagctccttccctccccagcgatcttgcacttgacggtccttctgtatggaacctccccgagatgttcatatggctggctcctggccactcctcaaggagaccttccttcaccactgcaatccctctttatcccattaccctgtcttatatagttcttaccattgcccccaaattctccatgtttactgactggtttgtccagtaaaacataagctcttgttcactcttgtaaccttagcacctgcaatagtctctggtacacgagagttgttcaagaaatagtcctgcatgaaagatcagaagagaaatggagagactcccgaagtgggaagttcacatttcaggacgtgagaaaacgctgaaattccaagatgaggggaagagagatgggaggtgagacttaacagaagcaggagtggatcattcaggtagattccgatgggccttgttaaagattttcatctgaagattaagaccaatgaacggcctctgaaaggtttcaaaatgaggagtgatataattaggtttgtgcttttttaaatatcagcctggattccatatgaaaaatgagtcacagaggagcaagaaagggttcaggcaaactagttaggaggctgccctggcgcctctgacaaacgaggaagcagcgtgaccacaggtgggcaacaggcattggaacaatggggtggcctgagggacccgtgacaatgctgagaagagaaagaaggaaacgcgtcaagtcaaggcagactctagatgtttggcttgctggctggtgaagcagcattcactaaaatactagaaagtgacagaggggttgaattggcagaggaagataaggactgtctctggcctagtgacttgggggcctctcttagatatcccaagggaagtggccaggagacagctggataaacaggtctgggattcagaagagaggtctggactcattaaataataataagatggccaggcatggtggctcacgcttgtaatctcagcactttgggaggctgaggcaggtggatcacctgaggtcgggagttcgagaccagcctgaccaacatggagaaagcccgtctctactaaaaatacaaaaaattagccaagcgtggtggcgcatgcctgtaatcccagctacccgggaggctgaggcaggagaattgcttgaacccgggaagcggaggttgcagtgagccaagatggcgccactgaactccagcctgggcaacaagagtgaaactctgtctcaataataataataagacttacttatacctggagaggtggtagaaatagagagagagaagcctcaacaggtcctaaagtttctgagaagagcccatgtgagaatggtggggtggctgacagagcccaggatgcagcagagatggactctttgaagaatgctgaaataactgggacttatggaactgcatagggcccaactgagctattgcaaaagagtatgattgggtatgggaggggatggtcaaaccctcaaggaaagtattccacaccaggcttacagagaggtatttgctgccaggtttctatgatttgaaaagccatgcttcccccaaggccgaatgactatatttctcagcctctcttgtaaataggtgtaggtgtgaccatgtcacatttcattaaaagaaaaggagattcattcttccccacctcctttctccaccctactgcttgaatcatggatgagatggctggagctctagcagccttttgtttcctgaagatgacagccaaacccaagagatggcaaagaaatgagctagaaagtgtctgcatctctgacaatttcatggaacctccatacctctctcaggctacctacttccagacttctttgaaaagagagaaaaataaatgatcttacttaagcccctatcatttgaagatgttctcttatacacaatcaatcctaatcctaaccagaacactagccaaccagtctaccccatcccctgccttgttctacccttaccttaggtcacagggaatattctcctccccgttgcctgtattgacttaaatcctgcccatcctttggaggatggatcagattctacctcccaccagagatttcccatccgcttcctccctgaactcagacgctgtctgcctgcctccctttgggcacctggcctgctctgccttccaagggagtgattcacccttccatatctatctcctgactcttcgaccaggctcgggaccatcaaggcaaggcccatgcattccagatccttgtattccctgggccggagaggcactggatacaatatcataacgaatatccccacactaagcctctcttacctctgcccacacgaggcagataaggagggggtgccagaaagtatacaaacacatttagaaaaacgagaaggcaggcggagtcaaagtcagttagttaaaaatctaaaactatttctaatattaagatgtagcctgggggcaagatctggtgtgtctctttcaaactacacaacctagatgttagactgcctcatggcacgatgccaggaggccccattcatgtagaaaacaacatgagtggcaacccccagagagaggtgaagtgtcatggtcatgcaccagaaaaatgagtcctttcagaaaaaaataccaagtcacatggcgcagtggctcacacctctaatcccagcactttgggaggtgaggtgggtggatctcctgaggtcaggagttcgagaccagcctgcccaacatgatgaaacccctctctactaaaaatacaaaaattagccaggcgtggtgttgggcgcctataatcccagctactcgggaggctgaggcaggaaaatcgcttgaacccaggaggtggaggttgtagtcagccgagattgcaccactatttattttttcacacttgcaacatattcttcacaaatcgatgtcaataacaaattacttttgattacttaacaagtattttttttcaaatatactttctaagagcaaatacagacaagttaaatggttcgcaatgagcatagttcatttgtaaagacagtataatgttttaaaaagtacacatttttttcagcttattgtctgcagccacaattgttaaactcaatcaaagaggccctggaggattcgccacttaaggctgaagtcgtagcaagtgctgccacgttggggaagatagcggcagagataaccactactggggaagtgtaaatggaaatttcaaatttagattaagcctgagtggcgtgaaaacaaacccagcatgttcaggtgcagtgtccagatgttttcaaaatgccctgattgtgagagctgagaagggagatgtggaaaacagacactctggggtcctcacggaaagcaacgaggcagatttgaaacccacactaaggaggcattgtaaatgaactcaagaacatgagcttggcacagaaggaacaagttgagagataagaagtttcctgattaaaataaccctagtgcctctttgagatctgcttctagcaccaactgacagctatttccaacggcagaagacaccaaatgtcaatctgtaacatgctacaggtcaatattgctttctttcctgcagatggtttaagcacaacttagcaactcctctgccgcctcgtttctgctgaaacttcgccgggttttaacacgcctgccaaaactgcccccttccgggcccaagagtccaggattctgtgccaagccgcgtggccagatgccacttggggatggcgcctgtgagcaccaaagcctgcccttttcgggctgagtcactacttgtaaccaccaggtgtcagtagcgagtacggagactcccatccggagtgctccgggaacttcagccagaccctaaagggggagaaaccggatgctgtggctttggggacaagcagtgctacggtcacattctcaggcactcatgagtatttcatttactcagttgccaactcaccatgcaaacccaccacgtaatttctgggatggctttaattcaatgcctttcacacactcagagacaagattaagcactgttctcactccaataggactgggaccttttctctgctccctccccaacccagaaggtaaaaacataaagcagggttttctactccttgcgtatcttctccatgtaaattaccaaattattattttagcagtttctatttgtactgtggttcaaggaatttggtttataatgcttcagctggggacatgcttgggtattactgggtactgagctgtaagagggaaagtccagcaaagcaactggattatgcaaagccaggaccaaaggccacttcactgcctgttttactgaactggatctaaactggtttctctcgtctggtgtagcatcttgaacatatatactggatctatgagtagctccagcaacatttaaagctgtatttccgtggccttttaaacccaggatgttaggaaagctctgctgtatctctaggtccttccagcctgaggacacatcttctggaacaaaagatcatgtggatccaggtccacgggctcttaacatcaatcgctatggcctacccagccaccaaaacagctcatcctgtttacctccacctgtctgcatccaaacacacagggctcctggctgggtgttcctttccctctgggtgccttgggtacctagttggtgcttctgctgccaattatcccttaatttgaccctcatgaagcctggcttccatatctcacaagcaaagatgctgaggacagaggagaaatacgatcttctggattaaggaccccaaggcttagcttagggttttgcaaatagcttcaagtccccatcttgcaacaaggaaacattcaaaggttttgatgctaggtggcatcactgaggcccaagacctggaaaggcagccagtcttgtgtccatgtaactgacggtgcagtgagctagccccactgtcactgcagcagaaaggggcaggacatttctgaatagagacagccaccaaaccaaagatacacgtttgatccaatgtcccaagggggtctgccaaaggcttagctatcataccaccttcacagctcccaggtcgatatttttttcaatcacaaaaagcattatcctaagtgatcaggagggcactaagggcatgtctctaggtagagtgaatcacaatgatgcccaggatctcagcttccccagcgagatcaccacccctcccattttccctggactcatggctccctgtcacatcccaccccaccccagcaacgacattctggcttgtgtcttccaataagcgtttccagctctgggctgagaaacgtgttacaggcgtctgaggacaagctcatggagcacaaaaccagcctcaccgtttggtgatgatgagaaacagtggtggacatttcctgaggaagaggtgctacagttctgccagagatcagttgcgtgtccattgcccacgatccattgctagagagaatcagatagatatcctgagtcagggagggagggaggagtgaaggaaaaggggaaggagaaaggcccagggatggcgaaaagcacccgcatccacctagccacaccgcccacccctgcatggtaagagccaacgttttatgacttaaaagcaccttgtaaatggagaagttccacatgcacacagaaacgattatgtgcagagatgtttactatagtagaaggagccatgaactcaaccttagacacctgcattcaagccttctctcctcccagcatctcgggatcattccccaagcccgcctctctcagtctatttccttgtttatagctcctatcagtctgatatcatcatcaccaggcacaatggagatactgtgaagatgcttgtaaatgttaaactaagtcacaaatccccaacataattatttctcacagagactagaaaatcatgcttacaggccgggcacggtggctcacacctgtaatcccagcactttgggaggcagaggtgggcggatcatgaggtcaggagtttgagacaagcctggccaacatagtgaaaccccgtctctactaaaaatacaaaaaaaaaaaaaattagccaggcgtggtggcgggcacctgtaatcccaggctgaggcaggagaatggcttgaacccggaaggcagaggttgcagtaagccaagatcatggcactgcactccagcccgggtgacaggctggagactccatctcaaaaaaaaaaaaaaaaagaaaagaaaagaaaagaaaacgaaaaagaaaatcatgcttacaatgtgccttaaattaagaagtgaaagccaccactggaaaactgcctgaatgtctgctcatcttcatcgccaagaaaataactttaagatctaatgggctggacagttttgtaacagaagttactctgatggcctgttcctaccagtggaagctttactaacaatgtgttgtgttcatgccataaagccgacatgggacctgtgaactcttttccagaaaagcccattttaactttccaatttcaagtcctaaaagggtgttttataaattaattcacccatctgactatggtttggagaaaaaaaaatcataaatactcctcttcttcaacgaggctgcatcaagaaaaaaaaaagttaaacaatcttgtcaaatgaaggtcggggaccctagatcggctctgaagttacttggcttaaatagagacctgcgcagctaacccagcccagcgctcgcttggttcctatcactgaatctgctctcgttttctcaaagcaactggaagggggcagattgccagaaacttccctgggacgtctgagacttccaactgtctgcaaataacacagtcctgaaccagcaggagcacgggctgggaacccagatggggaagggcgggccgcgcagggagcctccccgccaggcactcacgctgacgatcgtggagacgaacagcagcaccagcaccgcgacgtggaggacgatgatactcagcaacaggaggagcattctggcggcaagttctgctcagcggagtttctgcctgcgaggagagcgctgggcgtgaggccgaacgcactgggccgagcgacggaggcgcgcgcagagggagggtcccgcgcactagcggaaggcccggcctggcccagcgcccgcagcccgaccgcccgcgcgggtcaggagccttcgcgccgcctgccgccgagagggggcagcagccgcctgcaggaccagcgcccagtgcccagcgcccagccgggcccgcctgcaacggaacatcttttgcttttggaaacaaaacaagcggttcgcacgtctaaaaccacccagggaacggaggggtttccagaaaatatgagcagaggccactgcacgcttccacccaccccaagcacctcccggcgacctccctggaaggtgagaggtcacgttctccgagaccccggttcagatggtgaattcccctatggggtggaggtaggggtgaggggagtaggtgcccagatttccgtctgagacctggagacagccgtggcatgcggtgggggagacagcggcgaggaggctggtttcccagaccccagtgctctccgcattccgtttgtctccaagtttccacccaactctgccagcgtagaggaacggtcctggccccagctcagcctcgcgcagactctggcggctccggagaggtggtgcagagccagagtagtgtggaaagaaaagaatggctcgagagggttgcccggaccctgcgcttcccgtccaccgcgcgcttccccaggcagcccctggggtcagggggcattctgctcttgcgctagacccacgtgctcgcctaggggtccagtctgcaccccaggcactcaaagccaggacacgaaccccaacaagcctgagctccggtctgggtgcggtgggacaggagcccaggagcctggaccgaagggagtagatgtccagcggacgggagagagagacagagggtaaaaggctgagtccgagaatttcagccggtcagagccggcaggacatttatcccaagtaatgcggtcctcgcccctcattttaaactttgggggaactgaaggctgggatgacctgttagaggacatgcatggctgtgaaagatctggctgagactctggggaccattttaggcagagtcttgggccagggagacaacgtttcaataacccagtttggaaagtacccaatcccaggcccctctgttcctctccacaagcatcacattcaaagaaactctggaatgcactggaagaaataaacaaggatttctgatgactcccagagggtttgaattaagccgatggcaggaggctgggaactggggaaccacaggagtccaacactctcgggatgtccgccacagggactgttttgccagtgtgtcccagagtcaacgcctcttcagcaaggcgagaactgggccgcccttatccgctatccagacaccagcaccatcacccttgccctgtaaggtcttatagaccataaaggctctcctcgttgtattactccaagacccattggagggaaacaggacacacaggggaccctgtgcccctaaacagaagccccagggagctggccaaagccccgcgcctgcgctgcgctttctggcaccctcactggaagatgcccacatttctcctccatctccttcactctccccaccaaatcacttacagcccaaaggaacagctgtcccgatcctcagggtggcctcaaacacaaactcgggtgcgttggctccgctgctggcgccgccaaagctgcgctgcggggctgcgcgcgcgcgaagcaagggggcagtgggaggctcctggcgttcccctttaacgggaacaacgccctgtttgcgtcgctgcagtagggtgtgtccctgggtcagcgtgtgcgggagggcgggactcagggaggagagggggcaggagagagggagggcaggagacagtcacttggccttaaatgcgcctcaagaaaaagtcggtccctgcaaaaccgcggcgacttttactcgaaaccagaggcggctgagctttctcacctcccacctcccttctcccctggccccgtggagacctagtgttgaccgagaaactggctcctcagcccactctgggaagacccagccaaatgtagctcagcggatgcccagggctgggcttctgggcccgccgacgccgaccgcgcccgcgcggggctgaggctggattcctttcccactaatagagggcagcgggcgcttgagcgctggaagaagtccctctcctctcgggtcctggagcccctgccctgtcctggcgtcttagccggacacacctgccccgcgccggtccccgctattactgtctgcacctacgaagcatgccagcttcctaggattggcggggattgatctagcgggctcctcttgggtgcgaattaggggaagaaaagtccggccgactactggatagcatggtctgggattgggctcctcctagcctaggcaaaaccagactaccaccgaataagctctaggcaaagtgttcctgcagcagtcgggcttggctgtcagccttggctggagtcctggccatggggtttggcgggcgggtgcgaggtggccatttgaggtggggttggagcagccaaggaaatcagctgattcatagcctcctaacgtggcccgcccagcgttacagggagagaggctagcccccttcagtctcggcttggcagaggcgcgcccaactgagactcccgtgcgcaggccagccttgaggcacgggacagggagcaggaatgtggatgttaaaggtttctgcctgaaaatgcagcagttcacgcacgcgcgcgcacacacacacacacacacacttccctacctctagtgtactgtgtcatagaagctcatcactctcaatgattcaaataattctatattattttacgatttgaaaggagctgctattttagctaattgtatattcttacggtaagtaaaaataaatttgaaaaagatcttcaaacaatgatctttttaaaactatcgtgttatcagattaaaatgaagtgtacttgtaaacactgcatttacagtgcccgttatatgccaagcactttgcctggactttatatgcatggtctgtgagaggcagtatggtgcagtggttaggcactctggctctgggctccaacaaacctaatcaccctgcttacttttgttgtgaatttgggcaatttctcaagttcactgagcttcagttttctcaggtgcaaaaggaaatagtaatgcctgctttaaaggtttatggtggtgattgaaggagacaatatgtacaaagcagttaacatcgtgtctgcaacataataagggcccagtgcccaaattgccaccactattattatatcacatttaactctcacatcaacctttcagggaagacctgaccacctctgcactaaagtagcttgtaactctgataggtaggtaggtaggtaggtagatagatagatagatagatagatatagatagatagataaagatttataaatgaaagtgcatatgcaagtagaaaaaaaagtctaaagacatggcagtgttttctttcctccacaggtcattttataagttagatttgctctagaaattattactttgttttatgccatttggacatttatttatttaaccaacacttatgtgatcacaacatactcaggactgttctaagtaagcactttagaaatatgagcatatctaactcagggttttctttcccttcctttgtgattttcaaataaactttttaataaagtctaatacacatacagaaaagtgcatatattgggtgctacagctcgcttcttcctttcttttgaacccaatagtttaatcaataaccacccaggtcacagccacaccatatactgccagacaggtaaacccaacccatctgtccctcactgcctctggcctcctgcctggttctcaatggtggcagaggaagtgctactcagtgcctgctgaccaggcttgccacacccagagcccggctggccaaggctctgccacaggtggcagcttctccctaacctgcttaccaaggccacctgccagctgtgtgtgcacagctattttccatgggggaaaaagcatctagattcctttcttcctttcaatctggatgcattagggtttctagatgctctcagatggccccccacctccccagccagagtatatatccaccttttaaccaaggatataaaaagccctctgaatctccagtcaattccaacacaaatgcaccatctctcctgcaatccttttcatttgcggcttgcagggggtgggaaattaggcaattcttgtaaagcataggcacacatcacccagaggcacagtttgccaataaaactcacccggccaaacagcgtaaccccttcttccaagcagatttctttgcagccaaatgcaagggatgttaaggcaagaccctccccacagggcagtcagagacccgcagccgacagactaagcctgcagcttccaaccaggctccccgagatgttccctggtggtgctccctgtaactgaagccagaccaggcgtctttccagtttattcaggggctggtccaatgctgggatatgtcatggtggcctgagaggttctcagcctctattatttaaagagacagtgtccaactttgtttgctttccagaatacaataatcccaagaggccctgcagggcatggagaaactggaatcagaagggagaagagctttgagtatgcctgaagcctgtgatgccaagactgttctctctggaagtgccaacctgtgtaatagccaagaggtcccactggctcccctcccctcccagtgaattctgcagagattaaatatactgtgggaaggatctgtgtctacagtgttacatacgtgcaggtaagttttattttaaataaacttccttttaaggagcccaaacattgcacagctaatctctcacagcatcacagcagtgagccaaatgtctcaagagtcaccaaatcaagcctcctttgttccaacccctggttggaaggactccctgttacctgccttgtctgcctagaccccatcgcaaatgatcacatgtgttgtacattagaataaaacttagggaaatgtgttcttccgactctgtctttaatgtgcccgaatcaagctgaccttcatgagataattcaatgcaagtaaacgaacctctattgaaaactattgaaaactttctaacctgtcaggcagaataggctggaagagcaattggaaattcttggagagggaagtaaaggaagttatggcatatttaggttctttgcagcgtaccactccagctcccagagagtcctccatcccttgaaccgcttctagctgcaaactctgacacaagaggactggtttcattgcatgagtttcctggaattctggcacttggggcataagacttcctcttgtgttagggatccccagtctggagagacctgcagaatttggaggagtccctccctgtcacacactttacgtttgattggactctccagtcacaagggcctctcaatggccctctcccctgttctgcccacagccagcatctgctcacagccagcatcacagccagtgccaataaaatagtttcacctttctctctttgctgaaatcatttttatttttcacagcagtggttctttagaatcactcaagagctttgcaaatgacctagcctgggccatggtcagagaagctgactcaggtgttttgggatggggctcaggtatgggtaatttccagtgtctttctccccgctggatgtttcgttgtccagccaggttgtcatgtggagttagattgtcgctgatttccttccagctcccttctgttgtggaacccaaatggagatgaggtacagtgtgggctgctgcagtattatgcaagttataagtctgttctgccaggcaaaacggtgtgtgtgtgtgcgcgtgtatctgtgtgtgtgtgtgtgcgcgtgtgcgtgtgtgtgacagagagagagagagaggagcctccctcagtcctcctctgacatggtctgtacggggactgggaacagtgagcatggtttttgcagcctctccagacagtcttttcctgggtactgccatgatcagctccaaaggctacacgacagaggctgctgtccgtcaggccaggatcaagcctgaagacacgtaagattatttctgatctaagagctaaagattcagaggaaaaggggtagggcctggtgagtgtggggcatggcttctggccagataggagcagtctgattagccctccctctctccttccatgagctccacattctgagacctgctctcttggcctcacgtctcttttgcccaggtcctccatctccagcagccaaaccccgaagtccctgttggctgtcagcagtagagctgttcactgttgtgtgccactggccctgtctaccagatgccaacacacttgtctttacccatctgggccagactctcttcccttcccagagtcaggtgaggaaaactccttcctcgtctcccatttccaataaccttttctcagccaaatgggacccctatcccatgcatctgtgttgagcaatgtctctgcaaagctgtaggctatatcccactgagcctcttgcaaaataaacacatagaatagtcaccaaataacatttattattatttgctatcctcccttccatttacagataggaaaaatgagaatcgggattctctgaggaaacacagttgagtcaatgagactggctatttctagcacctgagctgttctgctacaccacgctccatcggctcagtagcatcagttatccgcaagtccttgataatgatgataataggttatatttacttcgtgtttagcatatgccaggcaccatcttgaatattttatatgcatcaaatcacttaatcctcacaaccgtatgaaataggcaccccatcatcctcttttagaagagggagaaactgaggcacagcgagatgttcagtcactttctcaagacacactgcaaagaaatgacagaggctggattccaaccaggcattctggctacagatcccgtactcacagcctggactatctcacattctaccgtgcccctaattgtgcccagcacgttcctagcatatcttctcatcatgcttccatagacactatcatttaatgtcctatttgtatgaaagatattctcacattatacatatttatgcattcacgtttctttttccattaaaaagcaagaacatatcctaagacatccatttttttttcagcaccagtcacatttagtacagctttcaagaatcctgtctcatcctgccaacaaggctgtgtgctcctccgaggacatttgcattccatatgtctgtatagcataagcactggcagaatcctgcctgtaggtgagattttaatttcataagaatgaaatgttgtccatgacagtggaatcccagcagactcttgaagagggaggaaacccttccgcactttatagctaataaaatgctgttaacatatggcagtatcttatttaagaggaatcattataatcattttctatgtgaagaaactgaggcttggaaaatttacagtgtttcctccagggactagctagtgaatgccagggctggggcttaaaaaagtccattcctctgactcccaaacctgtaattttttcactgtgcaggctccccagagagaaaaccagaggcaagtctgaatttggtgtttgtccaggtgatgaagttgttgttgcagcatctatcccaccaggtgctcagtcaatatctgaaaagtgtttacactaagaatgaagtctttcctgtgtcctcatagccagcagcctgtgtgggagttcttggccagccctggacacagctggcctggaagggtcctcaaaagtcagtcctgcctcatctagactcagctagactgttttgatgtcgagtgagagcagcttgttgaaagaacaagcaaggcagggaaagaaggcagaggggaaggaaggaaggaaggaaggaaagagggagggagggaggaaggaaggaaggaaggaaagatggaaggagagagggagggagggagatatagataggaagaggggagggaagagaaggagaagggagaagaaaaggaacagaaggagccagtttgacttctgtgacagaatcttctacaaataagcaagtttgaaattatgacaggtcccaatccctagaagatattctttatgaacaacacagacgcagtcagaaagcaacataaagacacacacaaaaaaaaactcacattggcacaggactgttccctaaatgacatctttaaaatatagaaaggtatcttggagtaaattgtatattaactccttcacctgtgggagagagaagtcacagaattattatgttgtggcagtgggaccagaccaagtacaaaggattctctgttcacaaatgcattgttgcttaggaaagccagattccacagatgcaagtggaggggggaaagcagtcttttctctgacatctcatgagttagcagctagaggattggggagcaatttaagcaagagtcagaaatggatgtgtacttgggattgcaaactctaaaacttttctaagactgtttactcctaagtgaaaatgcttctgctccagtagggcataggttcaaataaaatggggaagcagagcaatcttgccacacgggaatggacggaatggggaggaatgcagggattttctaggccactgcagaccaggcatagaaatgtcgagaaaagcagccttggcttgatgtgagagattgtccttattgagagaggtgcacaggaaggcccatgtaacccaaggaaatgcctgcttcaggcagtcgaagccacaccaagaaatggagcattaatctccagcaaggacgaggtgaacgcaaacggtcctggatgggaccctgggaggacaagccccacgacgcatcatagtccccacaatgcatcattctgtgtgcacttctgagcctagggagcaccagttgtacttaaaatgaactggagaccagatgttttcttcatctctgagttcctgcaccacttatcaagtgtgaaacctcagctaatccagggaagttcacagacaaaggtcaaatcctttcgagacgttcaagggaaagccgggcaaaacttcaagaatgtttactcttcattgttagactaggaaatatctaatctagagggtttcagtggtaagcctgggcctcatataattgttttactttaaattttgggctcagaaattaaaattctagaaatgtatctttagaaagtcatggatatgcaaaaatttggctataatggtattcatagccaaataaaggtgatatgttttataacaaagaaaagtgtgaacatcctaaatctcaaagactagaggaatgattgagtaacttttggtacagtcataagatgaaatattatgtaagtattaaaaaataatgtccaagaagaatgtttaatgaaatgaagagccattcgtgatggatacaaaatagcacacctataatttgttgagcactggctatgtgccaggcactgtgctaaccctctcattaaatacctccaacaatcccacgaggggagaactgccgtgacccccaagacacccacacagtgagaaaatggtggagccaatatataaactttgaccacttgaagccaagaccccaggttcttgaccactaaatgccaccaaatgtacagtctttgagtaccactgtgacaaaaatgaaagtaaaactgaaagaatgcgaagactgaagaatgcaatatgacagaatttgttcaacactgtgtctccaagttctaacattaaatgggagaaataactgcatggagctgaacacataacaggattcattgtgacgagcgatcgcacatctcagccttgtgcctccatcataaggagtctgtgactctgtaacttcggtgtaggaaacgcacactgcgtcaaccccagggaggcactgggagggccacgagccaggtcttgcttcatcttttgcactgaccccaagtggagtcactccaggcacagaggtggtatggcagtattggaataagctgtgcatcttacaatgttgatggtaaaatgcaggcatttatatagaccatgagtttaataactgtaccttatacttatttaaatacattgggagattaagaaaaataaaaggaaaaaagagaagtggttttgaagtttcttggtcttgagggagcctgaatgagccaacagttcattggtttagttatgtgactttaaatatgagaatccctccaacccacagcaagagcatggtcagacatgtggttcagatgagtaaaactgcactgacatttatggtcaatttgaccgagggagaaaactctcatggtttccaatggtctatcacctactgcattgccttctttctcagaatccctctccctcttgctttccctaccctccctccctttacctctctctatccccttccattttttttccctctctctctctcacgttccagcctcacaatgtgaaaccataatgaaaccgcaatcacttgactatctgaattctatgattttgtgagctccttgattattgggagaccccaggtcattttcgaattcctcatcccagcaaaatgtttctgcccatcctccccaggggacagtccccatgctctcctgctttactcctgtctaatcttggatcatttaacctgcaactgtgtcttgggaatcgctaggaggaaacacgattacaaagcattttctaaatgtatgggaccatggaatttttattcccaggttacctccaagacttaggttccacggacctcactgttggaaacattgggctccacgattctagtctctaaccatggaggcgagctgacgacagtcacttcaggaaatgaaaaggcagatttgaaggcaggaggtagaggcttaaggactccaggccagcgaagagggaacagaaaacatccatagaagccaacattgaagagaaatgccaaagaagtgtgttgctgtgattctgagtaaggagctgggtggatgtggtctgaggtcatgtggttctccacaggagagacatcgttcccagtggggctcaggctctccctcgtcatatgtttatttcccatttggggaagaacacagtgattcaattcagggagtgaccttgtcacagtctttggaagaactgcccagaacccaggtaaggcattctataaatgagcccacgatggcctctgggtattgaccacttggtagtttatttcttcacagcaggctgggaaccatcagctcaaaagcccactggcctcaaattcaaatttttacacatccagttattcttaaagtagctcaaacaagcagccttgttagccgcttggaacctgcctgctttgcatgccccatgaaatcttactcgcatcggctgccctggataccatagagccttgtggctctaagactccaagctgctatggcccttcggagctttctgacctggagactcctcaccacactgctgagtgacgttggtatcacctaaactaataagccctgtctccatgtctccctgccccaggagttcccttttctctttagctttctccatagtggcccctgaaagatccccagctgtgaaggattttccccatcctgaaaccctgtccaaggcccaccaataaagtttgttgtaatttattgcctcttattgtcttcttttctgatcagatcccttcctggaacaaatccccacatatggaccgggaggggtgggatgcagaggaacctggagatgggcacagaagcccagcaaggccgccaccatctgtacatgagggaggggcaggaaatcctccagagaaatggaagcatcctggtggcctcattacacaggccttcccagcttcctcacgtcacccagggaagagtttcttccaaagaacccaggggaaagtggttcatgtggattgctagggatacacccccaactggaaggccttgtgaaaaaaccttcaccccgcaagctgagagcgaagacttgttaggaggctgaatgcatggacttctcagccttggagctatatcaaataacctggtgcctcagcccgtgcataagcccagtggcagtccacatggtatgctcccactcaggggactgagagaccccttttcacccaacaatttcagtgtctgattatcaatccttaccttttccacacaatgttatgtgcaaatacctcaatagaacccaatctggcaggtctcttcttaataattgcacattgaaatgtctgttcgtcatctaggccagcggtttcttgtataaaggaaacaaaagtcatataattccttttactaaggtcactgacctttgcagcttcttccacgatgagagagtaaacagaagatgactaagtgtttttgacatccaaagtcacccacagccagaaccagagtctgggagaagtgtattttggacatcgtgacctcaactatgtgaaggaaaggaaaactgaagtccttttaaaataatattcattcaatagatatttattgagcaacagctacaggctaaaagcaaacatcacacagcctcttcagtctttattagcatgcaaaactagccccaaatgctccccacccctgtaaggatgcccccttgtgatgtggcatttctgctcccttcatcaagaggtgaagtctgattcctccactctttgagtctggacctggccatgtgacctcctttagcgaatgggacattaacagtgtgacacaagcagaggctttaaaagaacattctcattgggatttgctctgttgctcctggggacccttccaccatcatctgagcaaggctggacaagccactggatattgacaggcaacactgagagagatctgaactgcctgtgccatcccagctgaggtcctagacacatgagccaccacagcagagaatagctgtgcctgatctagaccagaatggatgccaaataaagcccagctacccctcaatattgtgaaaaggagtaatttgttgtgttaagacacactaagttttggggtggtttgttacccagcaaacactaactgatacattaacaatcctggactttgggttagacaccaaatgcattagatttgcaaataggtctctatgccagcaggggcagaggtgattatccctggcggtagcaaattgacttccacttgttccactggttgtctgggacctgaaaatggactgtaatagttggctcagtttcatctctaaaggaggagagtggttaaggccagagagattgagaagattcctggagttctttgggagtcacttgactctatagagactctcaggcattttctgagagtcttgtggttctctggagaacgctatggatctgtagagagtcccatagatttgtggagtgctctgaggtatagtgtcgaggaggacttctcaaaccaactggggtgaagcactgtgtttgtttgttctttatttctaattcatcacagtcagtgacatgacctacaggcgggccatgggagatggaacatgcccactatcatgcacttggatgccacgacaacatcaaatttctatcaaatgttctaaagttttattctcactgtctgtactcatttcaccacagccctttaaaagtttgtgaattggcactggtcccatgtgggaacaacactttgagtagctttgctgtagaaagagctgaggaggggcctctaagtatacagccccaggcctagaaccatgaactcccaaaagtgaaatgagcttgaccattaacattttctttgaacactgaaccaatatgccatttcttcagtgcccaatgcaagacctatggaaaatcagataacaggtgtatttgtctgttttcatgctgctgttaaagacatactgagactagaaaatttacaaaaatgagaagtttattggacttacagttccacatgtctggagaggcctcacaatcatggcagaaggcaaggaggagcaagtcacatctttcatggatggcagcaggcaaagagagagagcttttgcagggaaactcccgtctttaaaaccatcagatcttgtgaggatccattcactatcatgagaacggcatgggaaagacccacccccatgattcagtcatctcccactgggtcccttccataacatgtgggaattatgggagctacaaaatgagatttaggtggggacacagagccaaaccatatcaacaggaaaacgtttataaagaacagaacatttacttcagaagggcactgagtaataataataactctcatcatttagcacctcattggctagaaaaagtagttggggtaggaagcattattccgtagccatccgtgagccacagtcttttttttaataatatttttaatatatactattcttttgagtgtggacatatttgtaatccatacaaatgatattgtgctctaagacctcatcgtttttcatttttattcaacactgcttctgaaatctaaccatgttgctatgtgtacatctagttcaagtttctttctattattattactatgatactttaagttctagggtacatgtgcacaacgtgccagtttgttacatatgtatacatgtgccatgttggtgtgctgcacccattaactcatcatttgcattaggtatagctcctaatgctatccttcccccctccccctatcccatgacaggccccggtgcgtgatgttccccaccctgtgtccaagtgttctcattgttcaattcccatctatgagtgagaacatatggtgtttggttttctgtctttgcgatagtttgctcagaatgatggtttccagcttcatccatgtccctacaaaggacatgaactcatccttttttatggctgcatagtattccatggtgcatatgtgccacattttcttaatccagtctatcattgatggacatttgggttggttccaagtctttgctattgtgaataggagccacagtcttgatgacaaggttgatcaagtgccagttcgtccctgaaagctggtacaaggagtgctggcgagggctgctcaaggagccacagaaatgaccccccagtgctggctggagttctcatccactttgttctctgtactccagctgagccctttcaccaatatggctctaccctctctgggctctatgggccacactaagtacttgtcagggaggaaaaaggcccatcgcaggatttgttgataaacatgtaaaaggactctaaagggtctaagaagttgtgcaataaaaacaacaaagtagaacaaaataaaaacctgtttatggcctgtttcttagccaattaagatccttttttcctgtaacccaaaaggtagcatgatggtgctttgaactatgtcccagtacattttcccttctaggtgatgggtgggttactactcatggtttctctaccttcagaccctggcactggcattctaaccctggaaattctcttgtgacctccatctgctctttatctccctgactctcatttgtcctctaggtctcaggttgttattttttggaaagttcttaaactccctgaaaggactggttactaatccgtctcttgtattcttacagcaccccacgcttccccacaaaaagcacaatgtattagacctgagttgtctttttctttgtctgtcttctgcactagtctctgaattgggcaaaaacaccatttctgactcataccacatgctccatagatggctgcaaaatcataaaagtaaattttaaccttatagttctgggcagaaggtaagtggctcagcatgtcacagaaataaacccttggccaaagttttgttgcatgtgttttcgtcccacaaaactgcaaatatcacaatcctgtcacatgacatgaaagagattgtgtgcctgggagcctgtgccaagctgttcttcacccggagggagccctcaactgagatggggtgggggaccccaggctgactgctgacctcagtcatagctggacctagaggactggaagtgagtgagatggagagagcctcaggtcactaggtcaattttataattccagttcaagttcaaaggttttttgtttgtttgtttttgttgttgttgttgttgttttagaccgagtctcactctgttgcccaggctggagttcagtggcgcgatctcggctcactgcaacctccgccttccgggttcaagcaattctcctgcctcagcctcccaagtagctgggattacaggcatgtgccaccacgccccgctaatttttgtattttcagtagagatggggtttcaccatgttggtcaggctagtcttgatctcctgacctcaggtgatccacccgcctgctcctcccaaagtgctggaattaccagcctgagccaccgtgcccagccctgacatacctagatttttaacacttctcaatgtcattgctggagagtcatttttaggttaggaatactaaaatgagcatgattcagtttatccaaagttttgggataaagatgagatgtggagggagaaggctggaaggaggcattgcttagggacagtgcgggttcctacccaggtgtgttctagcaggctggggagagcagaaggcagctggtgcttgaataaggggtaccaggagcaagtagaaggaagatgttgagaaaatttagtgagtaccaaaatgtgctaagccctaagcgtatcacacactgtttcttgcattcttcagagtagccatacacagtcagccttccgtatccaagggctcttcagattcaaccaactgcaaattgaaaatattttaaaataaataaataaaaattaacagtgcaacaaaataaaaaaagacaaatgtttaaaatgcagtgtaacaactatttacataacatttacatcatattaggcaatcacaagtaatctagagatgatttaaagtacacacaaggatgtgcacaggatatatgcaaatactacacctttttatatcagggacttgagcatcctcacgttttggtatcctcaggggctcctggaacgaatcccctgaggatattgaaggattactgtaatctcaaattatcttaggctcagagaaattcaatgagatgtccaaaatcacacagttaccatgagtatataaagaactatactcactaatgatgcagtttcagagaaatttttttcagagcttttttccccttgctttaattttttttatatacctaaagtgacagtgttgaagttccacccaaattctgtcaaatcccatttgatcttttccgtgtatctgctccctgggctgcccccatcactcggcttccaacagccagtcctgccgctcttctctgtagcctgcttgggcttctgagccacttaacctgcaggcagagagagctgggaatgcaagagcccacccgcctgccccccaccccaccttggccattaaccagactgtcagattgaggaaaatgaagtcaggtcgctagctttgggataggataattatgggctggaacctaccttccaatgttcctcctgggatcaggctgaagctacccactgtggattttgcctgagatcatacccctgcacggcttcttctccttgcctgccctgtttcccctcccccttcgccagtctgccctgggagccctcgcataataagtcacttgcttgtgaatccttgttgcttgttgcggtgtctgcttctgggaaacctgaccttaggcaccacctcacatattttcttaacggtggtagaaaaggaaagaagcaaacaggagagcagggaaagaagacagaaaagatgaaaaagtggtttcactttggattatgggctgtcctttgtcagtcatggcctcataacacattagactgaaatttctgagacatttctttccacaccactgtttcacataattggtgcttttatgtctaaaattacaaagagactataacatttagagtttgcaaaatacttgagtaggctagagggaactcagattggaaactggcagctgatgggctgaactcagctcactgatatgtttggtctacacagtattgggtcacagtgttttaaaactgaattcattttcagcattttaaacctagagtcacatgaaaatccctgcttctggcttctcttgaaaagctgggctatttggcaatgccatgtgtacatgactgtatggcaggagtcatttggagctgagtaatggctcacaattaggtagtatattagtcaagatagaatggactctgctgaaatagcaaataaaatcgaaatcttagtggtttaatccaaggaaagatgatttcttagtcactcaaagtccaatgagggttggtaagcactataatccaaacagtgactcagggatccaggattcctccttcttgtgactcaccttatcaacaagtagcctccaaggtcactgggggaagaaagagaaggtagagggaggaacacgtgctcttaattccctgaaatgtcatttttcttcagagcctgttgaccaaaattaatccaatggacccaagccaactgcaaaggggacagggaaatatgggagagcacacagaatctggtgagcattgtctctaccatagcgagatatgtattctattttaccaactctccacagaccctactgcctccctgaaactgacatttatttttcatttatcattttacacaatcctcttcactcattacattactctgggttaaaagaacctgtatgaaattggagagcgtctggaatcctaagaatacctcacctccctcttcaggactgacatgatctgaagtagccaggagctttagacaggcctctccagggaggaagaagccctccaaggtcttaaacaaacccttcatccagtgactaaaagatgcccttttcctagacagaggtgacatccagttttttccggaggccagacctatcaccagcacctatttctgtctcaacagacaccggcaactggcaaaaaagaaccttttgaataaatgtgatgttttctctgtttgtcacccaacatctccaaaaaaccatgtctaaaatggtgactgagtcttcaaaccaggccacaaaatctactgaacaaagaatgtggttgaaattccccatgtggctgaattccctatgtggctagctaggcatgaaactatcacttaaaaccaattctatgggaaatgatatttcaagggcaaataactgacttatgaacagttcttacaattattgctttgtaaactagaaattacttgcaatgaactatctgaaagtgactcattaaaggtcaattttttcccctggttcttgtattaaaattagatttcaaactccttttaccctcagggtagaagacacctgcagtaaccaattaatatcaatcaaaagctgagagagtccttcacagtcttggacaattgcaaaaatcctctgcctaatagaactataatgtgaactatgtatgtaaattaaaaaacttctagaagtcacattatatagagtaaaataagacaagaaacattagtttaaacaataaattttatttgacccaatatgtccaaactaatttcaacaaataattaatattaaaatattgaaatgttttgttcttttttgtactaagtctttgaaatccaatatacattttttatactgtagcatatctcaatttggtctagccacatttcaaaagcaccataaccctttgtggctgatggcaacgtagggattgcagatctagatgtcaaattagaggagttaagctacaatataaactgcttaactattaaagaggaatcaagaatccaaagaaagatataattcaataggatttattaaagacaggcatcttctgtaaagcttagcaaccaaggaattgctaaattaggagagaataggaattctgagtgcaagactgtgcgagaagttggtcaagaagggaagtgtcttggttttggagtcctccaaaaactcacctggaggcaagggcttggtgcaggctttccatctgagagatgattccagcaatcaaaagtagggaatgagaaaagtaagataagatggcaggggggttgggggaagccaacatgggattcttttatgagagggttactattgctgggaagtttttaaagactcaggtagaacacacctcccagtgtctctctgatcatgttgatgggatgccagacaatgtgaatttcaccttactggatgctgaatatttctgtcttcctataagtattcttgatcttagttttatggtacagttacattacttggaaacagtttgattctttctggatttgcttttaacatttgttgggcagatccagaagaatagcattgtcttgatgcaggaggacccaattcagtcttctcattaatgggcatagggaagatcctttatattgtctgagcctcatttgcttcattttgggtattatccactgattcccatttgtcattggttgagagttgctcctagaagcattaaatcctgtcactttcatccttgtatacaggctgagaaaactcccacggctcctttgaaacccgcccccccaccctctgcaccaaagcagggatgcatgtgcttgaggtgggagagctgtcagcaggtataggaacctcccctgagctgacaggtaaatgcagaggaaggctgaggggcagagcatcaaccattaccaaaaggggttttgtttgtttttcctttttgcaaaacaattttattcaagtgtagttagcatggagtaaaccacacaaatttaaggaacacaatttgataagtccttattttgcctttgtttttgaaaatatttcttcctctgtatagaattatgggttgacagatatatttttctctccggcttttaaaaatgttgcttcactgtcttcttgcttgcattgtttctgatcaaacatgtgttattctgagaccagctatgttatttgtgaggcccagtgtaaagtgaatatgtagacccctggtacaaaaattattaaaaatttcaagatggcaacagcagggcattaaaccaagcattgagactgttcaaagtgtaccttgcgcaactgcacaggttgtgtgcacaggaagctggtcctgctgttttcatctctttctacctctaaagaacttggtttttaaagtctgtttataagactttctcttcattagtcactttgagcaatttgagtaggatgtgcgctgatatcattttttcctatttcttgtacatccgtttcattgaatttcttggacctgtgtttcattgtcatcaaatttgaaaaacattgcattcattcttcaaatgttttcttctgtcaactcctttcttttctctcctcctttaagggctgcctacacacacacacacacacacacacacacacacacacacaatcaacttaaggttgttccatggggcactgatgctcttttctttttttttttttttttgagatggactgtcactctgtcatccaggctggagtgcagtggcaccatttcagctcactgtaacctctgcctcccagactcaaccagtcctccctcctcaacctcccgagtagctgggatcacaggtgtgcaccaccacaccctgctaatttttgtatttttagtggagacggagtttcaccaagttgaccaggctggtctcaaactcctgtcctcaggtaatccccacacctcggcctcccaaaatgctgggagccatggcacctggcctcatttttataaaattattttattttctgtgtgtttcacttgggataattttcattgctatgtcttctagttcacttaccttttcttctgcaaggtctaatctgtcattaatctcatcccatgtatttttcatctcagatgttgtcatttttatttctataggtttgatttctggttacatacatttcacatctctacctaactttttcaacttgaattcagttataataaccactttaatgtgcttgtctgctaattctgacatctgtgtaagctatgggtttgtttcacttgattgattttcttctcattgtgggtcatttttcctatttcttggcacatctggttatattgatcagatgctagacagtgtgaatttcaccttgttgggtgctggatatttttgtcttcctacaaatatttttgagctttgttttatggtacagttaaattacttggaaacagtttgatcctttctgattttgcttttgagatttgttaggcaggtctagagctaattattgcccactactgaatcaagacctttctgactagcctacttaattatgagtttttccagtttggatggtggaaacaggtattacttccacccttgtgtgaacacaaagtattgttccctcaaattcttttgactggtcctttccctgggtctcacattgtttttgttcttacacaagtggaccaatcagtactctattgagttttcaaggtctctctctctctctctctcccctctttggtactttagtcctatgacccctagcatccttagactgcccaaactcagttctttctcctcaactcagggaattcactgggctcttcctggatttctcctccttgtgtcatgaactggaaactcagtggtgtgagctgaggctattataggattcatctcattcatttcttgtctctcagagatcactgttctttgttgttcaatgtccagtgtcttgaaaaccgttgttctgtacattttgtctgatatttgtttgtttgttttgctgttgtttctggccagagagtcagtccagtccttatcactccatcttggccagaaacacaagtccctttggtttttcaacctgtattttccaaacaggtcaggcagtttattaacacttgaccttagtcagagggttagcacgtgacttatcttccaagaatctgatccaagaccatctcctttatgaatcttctcctgacatatttcacctaccattgcacaaggtacatggaataaagcttatcctattcatgagggctacattctgagcacttcatgattttccatggtggtgtctaatacagcattattcttcctctcaaaatgcttctgttttctggataagagcaattgcttccttagaagaatttaatttttcctcatttccatcatcaatagcatctggcttttgtatcaagattgtttctcccagacaatactgagaaagtattttatcacaagaaggcagctgtgctggtggctaccatggagaaccatgcatctctgagacacgggcaacgagaagtcagctggtctctttttgtttggtgccttgtttctgcttattattctcagctcatcagttcattctgtgcctcagcagaattaaaattactgcacgtcacagacctgcatgactgctcacggactgctgacatcatgaataccaaatcgagttgttatggatctaattatactttattgaatttatttcttcatttatttctttactggactcctccttctaggctatatatatggagcccatcgaaggctgggacttgtcttacaattttttattcctctgcctaattacaatctctggcataaaacaggtatttgctgaatgaatgaataaaagcacaataagaaaaacgtacaaatctccaaacctctatgtattactagaatgcctgtactttgatgaccctgtgtttatatttgtcacattttggctgttaaaacatcattttcagctgtttgacaactcacttgtttatgttgcttcaaacgttttaaatttctaacctaatggctcatctagtgtcattctgccacttagacttcaagactagaaaacaagaaagagtgcagcatagtagtatcatagaatgtctcaagaatccctagtgcagggataaacacctcttggaagagctatcaggacattatcattttaccaccatcacccctgaggcttcctgaatgcttattatgtgcagggacttccagagctttactgtggcaaagtcaatccgtttttgcttttcaaactgataaaatacttagaggccatgcatgccaagacacatttctattatcacacttggccctccaccatatcaatgggttccacatccacagattaaaccaactagagattaaaatgttcaggaagaaataaaataaaataaaccaatacaacaataagtaatacaaataaaaatataggataacaactatttacatagcatttacatttcactgggtattttgagtcatctaaaggtgatttaaagtgtactggaggatgtgtataggttgtatgtgaatactatacccttttatataagggacttgagcatcttcagattttggtatacacaggaggtcctagaatcaatccctgcagatactgaggcatgactttttttctgttttaaacatcaggaaaatgaggatcccagtacaaagaaactttattagcaaagaagactggaattggaccctcctgtgtaagcacagtgtggttccagcagctcagtatgaaactttaactttctcactggttcacttttatctctgaaggataaaccctccaaggtgtttggttactagagcagtggatctgataactcttcactggccgctgtctgggacaggatcaggatttaatgtgaactatttgaaggcttcagatgaagggccatgcagccgaacatttagtcatgttcaaaacatcaaacatctgagggactgaactatgtttatccagacctggcaattcctgcatccaaaactattttcctggagcatcttggaggattagtctttgccagaaagcattcctataatttttctcaccatcgctactctctacgtgcagatgatgggatggcacctgcctgtttggctgcacgcaggggccggagcacagggacatcaaaacacagttctcacccaaatgattacagatacttcggctcagcacagccctcccagcatgcacatggggacactatggccatttgaagtccctggatgtacagaccggtttctggagaattctgtggttgtgacacctgggttctatgcctcctttcttggtcacaaattccaggcacaggccacttgtggttgtgcatgccagctctggtctcagcacatgtgagcataagattccatagcaaaatacccacggccatactgtagggcttcccccttgtaggcatagaggggtagggggacccaaaggcttccatccctggacagacccttttatgcctgagatgggttgttagttttatcttagtttgtgagtttggttccctgttgctgtctctcaacttttacaaaaacctattttattttattctgttttattttattttattttattttattttattttattttattttttagagacagggtctcactctgtcacccaggctgaagtgcaatggcatgatcatagctcattgcagcctcaaactcttgggctcaaatgatcctccttcttcagcatcccaaatagccgggactacaggtgcgtaccaacacttcaggctaatttttaaatttttggtagagacagaatctcgctatgttgcccaagctggtctcaaactcctaggctcaagccaccttggcctcccaaagtgctgagataataggcatgagccactgtgtctgacccaaaagcctattttaaatgtcttcccacaaccatgctataagacatcaaaagggtcattttttatacaccctgtatgagtttgctagggctgacataacgaagtaccacaaattgggtggcacaaacaacagaaatttgttttctcacaattccggaggctagagttcaagatcaaggagtcagcagggctggtttcctctgggcctctctccctggcctgcagatggtcgtctcctccctgtgccttcatgtggccttcccgctgcatgtgtctgtcctagctcctggtcttataaggacaatcatcatactggattaggtcccacccatatgacctcagtttcctttaattgcctctttaaaagtcctatctccaaatacagtcacattccaaggtactgagggttaggacttcaacatatgaattttgtgggacacaattcaactcaacactctgctacacagaaagtgtggtgggaccttaacaattaatagaggatctccaaaggaaggaaaatttcaaagaaagtctggcttcccctccccaaaaatagatcatccttccagggcagcttggagttcctggtttcctctttattcataagaattctatttctctgcagtctgtctcttagccaaacgcaatttctgccaaaccatatctcacccatacctaactctcctgcccccctgagccctccctttttccatagatcccacccagaacagctcaaagtgtcttcccaaagcacagctccatcctttaatgccccttcatggactggtcattcaagtttgaattactccaccatatgccccagtattccttcccagccatgtcctccacaactttcctggatctttttaattgggttgtttctgttttttgttgttgttgagttgtaggagttctctatagattcttgatattaacctctgatcagatatatgacttgtagatattttctcccactccctgggttgcttttcagtctgtcatgccccttaatgcacaagaattgctaatttccatgtcgtccaacttatccagtttttgttgactgtggagttgctgccccttggatgtaagcccagcaccacgtccaagctgttcactgctgccactgtcttctgagtcactaacactagtgtctactagaagaaatacttttctctgtcttttcatattttggcccatagaagagtagattttgctctctctcccatctagaggaatggtgaagagaacatatgcagcctttccctctctttcctcctccagggtcctctctcgggcagcagaagggactgtgcaactcatcaaaacttgacattcattggttctacaggcaaacagggccatggagtcagagccagtgctcatgtgccacccaccttttctggtgtttacagtggcttcctgaagcaggccagttatcgcaatcctgagtgataaagtgaaagtgtttctctgttgcttaatgagagttttgtatatattccagcagcagaaagagagaatggcctccaaacctctattggtgccatagaaatagatagaaagttaaaagggaaggaaggtcaattaaatgattgaggtagctcttgcacaaagtgggaaaatgtagttaggggtattgagagggacattgattgcacagagaaaaaaatctggttctccggagatttcaagttttcaccttttcagattatacctcattttctgagaatcaaaaaggtaaggtcctatgcatgatctatctctagggatgtggagttttgcttatattttttcacaatacaggatctctgggacacataactacttcccctctaaatactttactcagagatattctaaatttaatttcctggtatatgccttcctgacccacttgcccagtgggaaaacattttctgttgaacattgtagaaaaaaattgatgtattttaaaatcaactttttgtcaaatatatgcattctctacaataaagtctcccttaattcatttagcacagttttattttctttgcaaataatttctttttaaaaaaaagtttctgtattttgttttcactattctgttgggttaaattctcagtttacaaaaaagaatcactgattcaaaactggtctgttaaagaataaaactgtaatgaaaatagtaatataaatattgctgctcaaaataacatcataaatataaaaaagagagatgactccagtctagttcaaatatagactataaatctgcatattctagaacaaggacaggcaaatatgtttcctacaaataacgtcaactgcagagttaaatttttaaattggatttccctggactaaggaatctgcttctactctgcaatgatttatctgtttagaaacattgttgaacagagatgtgaagattttgcatcatttttcaacagtggccttttttaatatgcccactgagatttttaaaatcctaaaacaaacacaaaatattgcttttctagttttaaacttaatatttctatctaaagaggcacacagtcaacactcaaatccttctccaaagcacacacaggtttaggtcaaaataatcccccaaagtttgtaaaaccagtttcattagtttttgaacatttctgctcagaaaggaaacagcatacgcttgtggaaatcatttgtgctgttcactacgtttctctagctcatcaagagattgcatctctctgctgcccataaagtgacacatgaccctataaccggcttcaggaaatgagagtggaaacacagcttgaagagttggtctgccatgtaccatgctgtctctccccttgccgccatgacaacttggcactgttccagtaatggcggctccgccagcctgggtcccagagtgtggaaggcaagcagcagagccttcaggagatctgtgctaggtatgaacttgtctgagtaagatttggaggtcatttgttactgcagcataacttagtccactctgagtgatacgtagtgactgacagaactctttaaccattagacataagttggatgaggcagagtattaatagcatataaagtgcgtatgcacagcatacaatgagcaacgtcacatacttgtgtttgcttttggtttatggttggattaaaccactgatatagcaaatttggaactcactcttggactaagagtgatatatattcaaggaaaaaaatggctggtggtgttttcctgttggaaacttacgttacaaaagacgaggtgtttgttttagttaacaattatggtgtgagtcatggtaaggactggaaaatgtgtgttgaaatcaggatacatggaaactagctacgtaggcactgaggaaaggagatgccgtgacaataaaagaagttgcttctcggccgggcgcagtggctcatgcctgtaatcccagcactttgggaggtcaaggcgtgcatatcacgaggtcaggagatcgagaccatcgtggctaacaaggtgaaaccctgtctctactaaaaatacaaaaaattagcctggcgtggtggcacgtacctgtaatcccagttacttgggaggctgaggcaggagaatcacttgaacccgggaggtgaaggttgcagtgagccgagatcatgccactgcactccagcctgatgacagaacgagactccatctcaaaaaaaaaaaagttgtttttcaatgtcagtcttctcactacttggtattcaacattatacatattaattgtgatgcaataatgaaggaagtacattcagattggaaattaaaacgaagcaatgcctatttggtgtatatataccttctgagtgcatagtgtgaaggtattggcagaatataaaatttattttccacacagactgttaggataaggggtacccaaatgaggatttcaaagtaggaatgagtggttgtgaggtttttgttgttgttgtttgtttatttactgtagagatggggatctcactttgttgctcaggctggtcttgagctcctgggctcaagtgatccactcaccttggcctcccaaagtgctggtattaccggcgtgagctgccacagccagctatgagtgtgtgcgtgtgttttttaaggcattattactacgtggcactgataatatcagttaaggccctttaaataatatcaagtgatttgtccatgtggcacgtggaatatcttagcaatgtatttggcaattcatgaggattgttagagatggacgctggatgcagatgacttaattgctaagaatttgactcctttcagatatttgatgattttcttcaattactagaggaagagagtagtggcatgttgttgggtacacaatacttcaaaactgtaactgaaggatgccatggaatttgaaaaattccaaagcccaattcaaataaaaagtgtgttaggaaccattcactgctaccttccagcttttgagtttaatacactcttactgcacttctaaatgttcagatggatgcagggagtacagaacagtttctcaccatattctatttagttcttcgtcaggtgatttctgaaagagccacctaaaatttccttcggtctgaatggcctacaattgtgagctaggattctatgtttttgatatgcttagattaacattaaatttactttttagtactttcatgactttttaaagtccatgatcatctgaaatttatattagcatatcaaatgaaattacactctaattttttttccaaaaagccagttattaggtcatccatccttttcttcatcgttatgaaccgtggattttattggatccacacacacatgtgcgcctatttttggactttctatttcattgatctgtctgtctatcccagtcataattactatagtttaaaaatactgcttctggaataataatcaagtgaaaatggatgaaaagtttttttaaagataatgagagaaatcttaccttaaaaataacttcaaagttattatgaagtatttcatctatcactagaagataatatatgctgtattatacatgctttactttcttgccctctgcaagcctgcacacatgaacagctttctctgtgtcaaagcaactcacattgacttcattgtctctctgattgctgcttttctctccttcctttcactgccgatccgcccctgctgccatggaacgtgctcctctttcccttaaattcctgtgttatctgggtacactgcactccccaaagagaactattaaaagttatcagtgacctccttcttgtccttcaactctatttctgatcttcagcctcccgcacctcccttatataatgttgcccctcagcacacccaccttggtaccctctctccactagctaccctggacctcctctgactttcctgctgggaacttctctgccttcttgcttttcctgcatgtgtgctgcctgtacacacttcacttcaagtgtgactgggggcgccttgcacacattccttaaccttgctccccgcctcctgtggtttggatatggtttgtttggtctggccaagtctcctgctgaaatttgatccccattgttggaggtgggcctggtgagaggtgtttgggtcatagggacggatccctcatgaatggcttggtgccattctctcaggagtgggtaacgtgtcattcttagttcccaagagaattgcttgttgaaaagagcctggcatcttcttttctctctcttgctccatctctcatcatgggacacaccggttccccttcctcttctgccatgagtggaagcttcctgaagccctcaccagaagcagatactggcaccgtgcttcttacagcctttagaactgtgagctacataaatctctttctttatcaattacccagtctcagacaacacaaacagactaagacacccccaaaccctgagagtatgagttggtttagttcacgtggcttgtgttcatcaaggaccagctgaacgttttcacagcgtggtctactgtcagctaacacctcctggtctaaaaggaactgcccatcttcctgtggtctcccagaacagctcctctccttgacactccgatggcaccattgtccccagcacctccaagacatcttctggatgtgcgtgaaaggagcccctaatttacaaacccttaccacgtgatttctcctccttccactctgctgcctccgctagcttattcttcctacttcctaagtaggttccatggaggcttctattaaaagcttttctggcttcctgatcccaacaggattaatcaaaatttcttaccttggcacccaagaaccctggtgtcagtgcacagacgttgtttgcagcatctgtactcactgccaccctgattgatactgaagtcaacaggatttggatttcaagctggacttggtctcgcagtggctatgtgggcttgggcaggttattcagcctcactctcatcaaagaccttgggtggcgtaagtgggatttcctacatgtagcctgtatgtgtcaaacgatgaagaccctccagtgatcaaggatcttgcttgttgaacatagacgcagaacgtggctacactgtacaacagtaatggtaacacccctggacttcagaaggtgaacaaaagggctcccctcccttccttcttccatcttctcagaggtcaacacagggaccctcctttgtttcttctctgctcgtggagatcaacaaagcgattctctcttcctttcttcttggtcaccccttttgacccattggagctatttatttcttggcatccccaaaatgaccattacatgtaataggtgttctgtaagactttgcaaatgaattgttgcatgagaccacccattcattgtatagagaaaagatcactgagaatgaacagatcttggtttaggttcagatttgccctattctgactgcatcacattcaacaactatataaccttgctaagctttagtgccctaaattttcatggggtgctctggtcagtgttcaatagccgcacgtggctagtggctgtcattcagacagataagatgtagaatattcccatcattgcagaaagccctattggacagtgctgatagataaaacactacaagaagggtggtgtgtctgccaataatgtcattaaatactatttatgggaaatgcctagaacagaagctacacagacaacagaaacactgcatttggcagaggagacagcctctgtctctagattactccagtgtgtccatggaactcgattagtagggattcagacaaacaactaaaagaccccattgcaatcatctgggctcattgaatgataggaaagaagaggaaaaggctaccttggaaaggtagccccaccttacacaggagcccctagtgttcagccaaagataccaagcaattctaaaagataatctgaggcttcaaatgggaagttatggctttcaggttttgttttttgttttttgtttttttgagacggagtctcgctctgtcgcccaggctggagtgcagtggggtgatctcggctcactgcaagctccgcctcccgggctcgctcccattctcctgtctcagcctcccgagtagtacttttagcagagacggggtttcaccgagttagccaggatggtctctatctcctgacttcgtgattcccccgcctcggcctcccaaagtgctgggattacaggcgtgagccaccgcacctggccagctttcaggtttttaagcttcttaatcgatgtaagaaatcgagccttcagtcaaaaaggcaaagggagctgcatggtatttagctcagggaaagagattgggaggcaatgtataagagattatagcttatcccaacgaggagatattatcagatgattgccggacctccaatttccccagatccccttcaatatagttctataatgtgttactattaacaaatgccttggctggatttggcattaccagccttacccttagttcctcgagggcaatacctatgtccatcttttcactcttcacagcacaaccacagtgctcctgcaggactcaagattcatgtcactccttgccttaaaaccctccaaagggttccagatcccactcgcacacccaggattggctacataatttgaggcgcccagtgcaaaatggatatgcagggctctttgttcaaaaattattaagaatttcaagatgggctgggcatggtggctcacgcctgtaatcccagcactttgggaggccagggcgggtggatcacctgaggttaggcgtttgagaccagcccggccaacatggtgaaactccatctctgctaaaaatacagaaattagttagtgtggtggcacgtgcctgtaattccagctactcaggaggctgaggcaggagaatcactggaacccaagagccggaggttgtagtgagccgagatcgtgccactacactccagtctgagcaacagagctagtctccatctcaaaaataaataaataaatacatagaatttcaagatggtgagaataaagcactaaaccaagcatagacccttctgagtctcacaccaatgaagctggccctgcccctacataactcctatagatagctactcaaattttcagggtcttttaaaatgtgtttctctctatctagaacacccatgggggctctcccactgccatcgtgttgcatattgatttctcacctttcagataattgcttaaatgtcccaactttgaaaagcctcccaaggcccaaacactcaagtccttacaaattctcataattaacatagttctttgtatgattattggttgccagtataatccactgactgtaagctctgtgaggacagaccccatttctgtctcattcatcatattattttcatgatctcataaagcactagcacatagagggtgttcagtaaaaattggtttattgaatccgtgaataaatggatgaattgcaattttctacagaccatctcttcaaaggattggcaggggggacaggaggaggatgactctggaggcgagcataccacaattcccagtccaaatccagtttccagcctagtgtcactcaggacacctgattcaaccagcccgagagcagggagacagtaaatccaaagatttggatctatttgtatattattggaccatcctattgttcctactgggtctcagtgtattcttctcacttgccactgaatttgacttgcttatatatttttcagggagttttattgattacgaaaaaagacttcattagattattcctcaaagaagtcttacgggtttccaacctctattttgaaagacatagcaatggcttccgaaaggccaagcaatgcagcctttacaactaaaaacataagcgtgtctcatctgactgataacagtatttaactgaggagagagaggctatgactggggtggtagaggtcaaaaaagagtttagcctcatctgtaatgtttcatcatcttaaaagggtaatatatttctatgttgtcatacaattttatataatattaagatataaaatgtaagtcatttgctatgcaggtaatatggacagagaaaaaaagaaaaaatatatgtaaattaatattatatatttgcttcaccttcctggccataaaaaaattaaaactcaaattcttaaaaacaaggatgctatacccaaaaaatccatatatatggatatacagaaataaatatatagatatggtttaaatgttaaaataagcagctgccttgattatatccatcacataactgacgctacagagcttctcattctcatcatgggatggattttgttgactagtataattctctagttgttttgttctctttactgagccagagtatttcactaatgccaatctggttattaaattttaatttgatgtctcttcaactcaaaattacactctaaccgcgcagtcttctgtaaaatcatgcaaaggtaaagaatcacaagactacgtgccgtcaagaccttttgtattatccatttggaatttgtagtaaggcccatgtcttcggctcatgtgcctcttcctctgtttgcccaattgacagctcaaattttgtgttagagaatgtcaagcttcttttattttttatgaatagaattaagctacactataatgctgcttttgtagacatgaatgaacaggtattgcactatgggttaggtcatatttcttgatttctaacaacatatacttttaaagttaattttacaggtctagtcccccagaatgactcaatctcccattttctattggactgtacactggtgctataaattaaaaccacatcatgttacctgtcccagctggtacattcttgcatctctgggcctcagttcatctcaggcccagtgtggccaccgacactgcaatttgaagtatgaataaaacaaacctaagctctaggactaaactggggcacccgtctctactgttatccttcttaagttgctttgtaaaataagcatctgaagacatcatagtattatttcaatctccaagccagagctttctgtttcttaccagggtttcaataacctcaacagcagggtacagcagttccagccacacagggcacattccagagcagaatagaggctccctctttagtctgggcacacgttcttcaggtctgcttatttgaggcctgctctctgctcccctaaaactccttgttgtttctccaacccagcagctgaagttcagctgccactgaacctcactgttgtttctgttatagtaaagtgataccaggaaagctgaataaccttcgcttatatctcctggctggccccataagcgtttgagcttgccatccccactctatagcttctgagtgttttaacactaaagcgccttgggttgttttggctctcatagtcttagaaatacctgcacctctgggctggctattctgtgcttagagggccttgctttgtcctgtttcctaaataggtacaaactttttttttttttttttttttgagatggggtttctctcttgttgcccaggctggagtgtgacggcacaatctccgctcaccacaacctccgcctcccaggttcaagcaattctcctgcctcagcctcccaagtagctgcaattataggcatgcaccaccacacctggctaattttgtatttttaatagagacggggtttctccatgttggtcaggctagttagtctcaaactccctacctcaagtggtccacccgcctcggcctcccaaagtgctgggattacaggcgtgagccactgcacccggctgaaaactatttcattttagcctgctatttctagggatgggatgtgctcaattgcctagccagcactacctgcactctggggaactaaacagtctgaatttcagagtggaaaatgaccattcatgttatagtccctgcattcagctgtttcttctggttggtgcatcagtcaggataggctaggttaggctgcagtaacaactccatagtgtccatggcttacgactgcacgaatatatttctttcgcatgttgaatggctgcagtgggtcagcaagtaagttctgtttattgtggtggctcagagaatatctcaaatgttctcggttgtcatgtcaaaaggaagaaatctttggacaatctcacactggcaattaaatatgcaagtctgaagtgactcacatcccttatgctcggtcacatggatccactcatccacaagggactaaggaggtggaatgctgtaaatagtttagtagtctaggccacttatggctaggttggttttcaatgacagagttctggaaatcaaataactgtacctcactcaatctcttctggcatcctgttggcaatacccattgacattgatgagttgtgggactagcctccatataccttttatcaaattgtcagggaatggttttctctatctgaaaaaacagagtacatagatactcagttcttatacttaaattctacttaaagatagaatcaaagaagtttagagctaagacttggcaatactatggtaacatttattgtactgatggtattgattatttataataaaatattacaccttcatgaatatctgttgggatattaaaacattggttttaaaataatttcctttaaaaacacaacttttgaggatgtctaattcattctaaacagcttagaagaaggcactgtaggatgatagcaaagagctttggaagcaagctcatctgagttgaactcctgactctgaaatgcgcccctgtttggctttgggttattttccttccctaagtctcaattttcccattttagaatataaataattaaatgtatgtaccttagccatgatgttgaaataatacacgtacagttgttctgctcaggaaaagctggctatcattatcattacatgtatcaatctcaagataggatcaatgacacagaagctggatcccactcatgttttaattttatacacattttccaaaagtaaaaatttcttaaatgcttctgtcctcagatctaattccaataatgcaatcattttacacattttttgttgttgctgagaagggaaccactgtctgggattactctcctctcagagaccaattaacagtataggggccgggcgcggtggctcacgcctgtaatcccagcactttgggaggccgaggtgggtggatcatgaggtcaggagatcgagaccatcctggctaacaaggtgaaaccccgtctctactaaaaaatacaaaaaattagccgggcgcggtggcgggcgcctgtagtcccagctactcgggaggctgaggcaggagaatggcgtgaacccgggaagcggagcttgcagtgagccgagattgcgccactgcagtccgcagtccagcctgggcgacagagcgagactccgtctcaaaaaaaaaaaaaaaaaaaaaaaacagtataggatggtagttaagagctcacatcctagtatcagccaagaggactcaggagattgtcatgttatatgttgggatcatagtaagcactccacaaatgttagatgtccttcctctccaggaatttgatttctgagaatccagtgaaaactttagttgtctattgtcacgtaacaaattacctaagaacttagtagtttaagacaacaatctattatttcttgagattctgtgggttgactgagcagcccttctctctcacatggtatcagctggggcactaggagagtgggaagatcccaaatggcctcactcacatggctaccagttggtgcctgcctagcctgagagctcatctagggctgttggctggggagcctctccgtgggctgcttaagctccctcacagcatggtggactcaggctagtcagatttcttatatggcagctagcttccaaaagcagaagcttccaggccttcttaaagcctagacatagaattgacacagtgttacttccattgcactctattggtccaagtgatcacagagtccgcctatattcaaggagggaagacttcacaaggacatgagtatttggaggcatggttattttcccacagatatttcccaccaatatctatgatatccaccttagggaactgggaaatttggtcgccccttccagcactgctgcaaagcatcaatatgttaatctttcagactgtgctacatgtggtgctcatgggtgttgtctgtggacctggcttattattttcctctcaggttgcttgtcctcctctctcttcaggagcccctgtccttgctatacccatgaagagcactggggttgagagatgaagacaaccagctcgttgcaaataaatgggtggccctcaatacagatatggatttttattatcagaaaatgtgcagttttgctaaagagcaggttctcgggcaagcagagcatcatttttatggaagtagggaaggcattcttatgtctgagtgactgcagggctaaaatgccaaagacgggaatgctgaaacttagtccaaagatttcacatcaccttaaaaattaacctttactttacagggagggaaaaaagtgcttgcaaaataaaagttatttttatggttcccacagccctatgcatacacaagcggatattatttagaatagctatgaaaggctccctgttctcaataagctctcccctcactctaccatgatgccatctgagttgttcaggagtcatggtgatgtatttaggggtctttccttgccaaaaggaaaacgtgggctgcagaaagggtctccttctagctcctagcaaaattagcaaatgggtaggtcctatgggaatgagccagaggtcacaagacacatccttctgatgttgaaagccaaggatttctctgagctgagaaagaattcagagctgtttagagagagggatgagggaatgtatgcagccacttccccattctggattccctgcagatggaactgtcccattctgtagcccaggctggagagcagtggcatgatcatggctcactacagccttgaccttctgggcacaagtgattctctcacctcagtccctcaagtagctgggaccacaggtgtgtgccaccatgcctggttaattttttttattttgtagagagatggggtctccctatgttgcccaggctggtcctgaactcttggcctcaagcaatcctcctgcctcagcctcccaaaatgctgaagtcctaaaattcttaaacaggaccacgcttctgatccttggagctcttggacttcagcaggagccacagcacccatttcatatggcactatctgttgacctctcaggatccttctcaactcaaccttccagataaacattcccagtggtctaggactggcccccaaggtgaattgattcaccattcctggggaagagattgagtattgtttattttccccatgaatgcatgaatacttatcagaccatatatattaatatagagctcagatagcatcatcagagcactctgcatagaaggctggtcttggcagttggtgccaatggtgaatccagccctgctgggaacagtttcagggccagggctagaagaggggaggctgcaagggaagactcgggcacaatgatgagcagcagcttcacctcctcctttgtgctttgggttagccctgcatacaaagggaaggaatccgcccgtttctggtgcaaaacaaaaattataacctaaaatcagaccccacacttcagctatttacagcatgaactcaggactcaaaagtgccaggtgaggtgtttatgacaacactctccggagacagaaatggaaattactaaaattacaggcgactcggttatttaggggcaattacacacatttctaaatctgaatgatgcttgggtaagtggaagcctttgacattccagcagcccttcttaaagccacatgatattaaagatagtttgggcttaaataaataaagccagatcatgtgccagtatttgtagtcctaagattcttaaacaggaccacgcttctgagccttggagctcttggacttcagcattagaatatttaccctcctggagtagctgcaacattttagatgagaaaccaaatgtttatttgtggaatttagccttgcccacggtttaccaaaataacaaaaaaaacttttctatgtctgaattacatttccttcccatcacagtcttgtaatgccaggaatatatatgcttcagtaaaaggactgcataagcatatattcctaaaaaaaaaaaaatacagttcatgaaaaaagtcagaaatgttttaccccaaacacataacaaataagagacatgctgaatttatgtttattcccactattgtctaaaagtcataactaccaacatttggttactctcattgctaaaaattttagtggcatttatatacctttgtttccattagaggcaaaaacagaacaactaaacctacaatttgatttctaaaatgatatactgagaccacagcacaaccccaatacaagcttctcatctggacatccactcttctggcattctgagatgatttgtgaaatttactaaccaaggtcttaaaacacttttaagaaacagagagagagaaggaaatggagttggggttaatggacagtggttaaggcagagcaaggagaacacaaggatacagagagaaatgctaataagagagagagacacagaagcgtgagaaataggagagaaaagaaagaaaatcttgctcccctcctggttcatcttcccatttcagagctctcagaccaaaaggattcaaaactagcatgctttctacaccatctaaacatactttccaggtgattaaatgccacttttaaacatacaaaagaattagaataaattataaataaattatcttgggatacagaagtgctttctgagcataattccaaaggcataaatcacacagaaaacactgacacatttttacttgtgtattttaaaaaaccataaacaaaatgtgaaggtaagtaacatataaagaatatattgtcagtacataggacaaaagtgtcacatatgaagaaatacagtgggcgaggtgcctggagaaggggggcagtgggtgttcaactccaggttcaggggctgggggaactgaggagtatctctgagcatggaaatggctttatgaaagcaatgctcaagtaataaaagtttgaattggagagatgagagtggaacaaaaagagacgtgcagaacacattatgaattatgcattatgaatcacagccaagctggccctacctactattgttccaaatgcactccgtatttctctacctttgtttttgatcaaattaccccaactacctcatacccagtggcctttccccttcttactgtggatcctttaaagcaaaactcagaaaccacctacttcatgattcctgactgcctcagagagaatacagtcctcctttccagcccattcggattacacacaaaatgacaagaatcacaccagttatcctttttaccttctctattagattgattatatttcttcatatccttcccataacccagacgcctagtaaataatagaaaattaaggtttggatgcaaacaaaaggctttccgagacaggaggttggtacatttccatcagcataatcctttaataagtgactatattagcattcggttcaaatgctgagacagtgctctggctcagccttaacttaggggtatcaaaaccacacccggtggggtccctagcagaagccgaccagccggagggtgttggggtagctcttgcgcatgctcatgcatttttcctggtcgatgtacagggaattggctttgacagccaggtcatactcgagtgtggctttgatgtggaccagcgactgcagggtgtcctctgcatccctcaggcgctgctgcagggtctggatggtgtcgtcaacctcgtgtacctcgttaacaaggctgcagcataaaggaatcagcatggttaggtcagcatgtagcttacgcaactccaagtacatcacattgtaaccagcgatgcaaagctcacattttctttactttaggatatatttatcagcaaatgagaggtgcatgaaattaataaaatataaagaaatataaagagaatggtgacaatgaaccaatgggaatgtagatgtcccaggagatagaaaaggatttcataattatagaaaaatatctagaccattttaaaatcattatgccaaggcaattctatagtttcacagaaattcacaactggaaaacgaatttagagaggtcaccaagcccaacttccttgttttacagactaggaaatagagcccaggggttcataagctgtcctttccatcgacacagggcccacatgtgtttgtaagctgtacctgcttatccaggaagctaagaaggaaattcagcgcttcagtggccataataagaaactgggtcccatttcctggccccattcccctctcagctccttgagacagaagagtagaagcagagacccaggaagacctatctcatcatctgcagacacatcctggaatatgcttgcaatttctcagacctcgagggcttcactcttgctgtcccctaagctcagaatgctcctaacccattcttcatcccgctaatttatcccatcctcaaatcctaggtgaattaacacttcttccggaagtccctcccttaaaccggaaaccatctgctgcccagtgttgtgacttccaaaaggaccaagccttttacggcactcagggtcttgtgattgtctgcttgcaacatctgctgtccttgcccagggctacatccacagccgctcctgcaaaaatacaggtgtgcaaaaactacttattgggtgaagaccaactttcatgccctaggtgaaacggaggacgtcttgggaggtagagagttgcccaaggtctgaatccatgggatctactaagaacaagacccagacccaaggcaataaaaaggaaggaaaggcaggacggagcctggagcattcgcttccaagccacttgtaggtggcctaagaagaggaaggctgtggtaaaggcccccacgcaggctgattgaagcaacaacaggccatgggaacatatccacgctgtgcaacacctttcatcttacaagctctactgtctcctgctttccaatggggaggggaagaattaaagtttaagtgccaaagtttggttttgtctggggacggtaaacacaaaacctgagaactcatcagaaagcaaatttcttgttattgtttaggccaaactgaattaaaaaagaaaggctttttaaagatcccagggtataaaatatcactagcaaagaaatacatcttcggcgaggctgccgcagatggctggtaatgggatttttgatggtggattgtttacaatcacacggggcctgcctcttgtctcccaccctccctggcttcaacaggaaccctgaaccccaacgtaggaaacagagcaggatgatatatgtgtctttactcctttcagccaaatacgagtctagtggaaattttatctgggagggaacatttgaaaatatacatgtcaaaacatcaatgctaaaaaaaaaaaaaaaatcgagatatagaacgtaggcagttagaatacttgttttcacactgctgcatggacacaactagggaataacatgcttccacttctctcatcgttaattagaaatatatttttcatcatcttcaaggccctatttcactcccagtttccttgttcttggctgattgcagagagctgttctgctgaagtcactctttctctttctttcttcttttttttggaattacagaaccacaaaatgtcttgcattcaaatacaaataaagctaccacagtttatttatatatatgtgtgtgtgtgtgtgtgtgtgtgtgtgtgtgtgtgtgtgcatatatatatacataaagattatttaagtagagcagagcctggtctgtctggcctgccaccaaaaatgccaagaatgtttagaatcacttttgaaataactcgtttagaacatttttaaataaaagtaagtcttgaaatgaaaacagcaatttttctcagtccccactccccttagtttatgatctttattttttctaaatctagaccgccgaagggctgctttcagaaccatccatttaaaaaggaaagtaatcccctcccccaataataatcctaaagatttttggcaaggatattttaacaagaaaacttgacagaaacaaaagtaggttttgttcaaaagtcagtaaaggagcagaggaaatagacataccatgaagtcggcaggaagtgaaagaaaagcaaattctgtttagccaggaataggaaaaaaaaaaaaaagagtaaaaatcattcagctcctcaggagaagctgtgaatgcctcattgtttgataattccgaagtcctattagaccactacccaaaactcattttaaaagcaaccctgtgtctgtctaacggcagtataaacaatttatttgttcccatctccacttttgatgactctgcagagatttttggagaacgaaacatcagttcagcttctcctaataacatttacataaagtcaaaactggtgatctaactctaataggccaagtgggtgtgcactcactgctgggttcttctaaagcagagaggtgcctccagttggctgtctaggggcccatgtagtctctggagtggagagctgcttatcctaaataatgagctgtgcatgaagaggggttctatggaacccactttgaaaaacatgcagcctgagtgatctcttctgtggctatggcctagataacagctccaccaggagaaatacaactcatcctggaaatgaagatcatttgcgtacaacctaaagcacgcttcatggcactcaacacagacaacatgcgtgctatacacgtaaggtgtttcatcataatgatctcctctgtgaccttcagtttcatcctctgtgtgagagggagatgagcatgcagcatttactttgccaactcttctcaaatgagatcaggtacctgacagggggatggtaaatgcattacacaacgtaaaacacaggagaaagagaagcaaatggcttggtggaatagaactctggggtgagacaggcaaagactcaaactgcagctctctcaccactaaatgtggcctgggccaagccactcacccactcctgcctcagtttcctcacttgtaatatgaaggtaatgaatgagatagtataaagtgcttagggcagtgcccagcatcgagtcaggttaagagatggtagcagctattattatcattgcattgattatcgccatcattatctttactattattatcatcatcatcaatgttggcctcacaagatcccccttccttccatttcaggaaatccactgtctcaaaccaccacttatttctttattttatccttaggatcaatccttcaagataagagaattttatcgtggaagcagagcgagtggcatctccccactgcaccagaaaggcttctggagttcacgcactgcccttggctcctccagttgctatcaagttgatttacttctgcatggagcatcttaggacctaagaatagcaatgatgaaacccagaaagaaaaggcagactcacaggtattgggaaattggaaatgaagccggattgtggcgggggtagggagggaatcttggccagttcattacaagtccatcccaaaatgaatcttcaaagtgaaaataataataaaattcatgtagtgtttagtagataaactgtggggtcagattcctcctgctgtgtatatataggagctgtgctcgatgaagaccagctggctttgatttctactgagaatgaaacacattgaaataaacttaaatgagatcctcagtcacaaagacagcaaatgagtagataggagtcagtggaattggtactgaaagtcccttttctgtcgcgttccccatgctgagaaatacacagaaagtcacaaactgctgcttataagacaggagttctggaaactccgaagactccaagaacatgcaaaagaacccgaacaccacactggcctccccgaatgagttaaaggcttaatagcactttttgtgtgtgtagcgttgatgtcctttccttttttaaggatttgtggtaaaatatacataacataaaactttaaccaatcttaagtgtacagatcagtggcattaagtacattcacactgttggtgcaaccgtcaccgccatccatctgcaggactgtttcatcatcccacactgaaactcttctgcattcaacatctccccattactaccattctcacagaaggctcctacatgctgcgtatgggcagaaagcagctttctaaagagccaggcaccacagttggtctggtggccctccgagcgagccccgagccttcccctcccaccttaccgtagctgagccatgtctcggcacaactcaatgttcggccgtcttgtgcgctcatccagtctggtctgagccaccttcaggaaggcagtcttgtccttgatggccttcttgatggattctatggtcatttcagtctggaaaatctcctgcagggtctgtgacaaagagaagcaactgcctgaggctttggtgtggtcccttcaacaacccgcctcccacctcttgcctgtccactccatgtccagcacgtgccttgacctcgctgatgaggaagttgcttcaccaagaccgtctatcctttccagccctgccccagggaacccacgtgtctcactggagctggcatgcacctgctctggagagtgggcggcgcctctctccccaaccctaggcttggcaacctcattttggtagctggaaatcagccagggtgggagtatttcaactacagaaattggcaaatgctccaaattaggggctccctgcaagctgcccccaatggccgttgttaattactgaccagcacacctctgtgttctgataaaagtgaggctttgagtggccctgatctccctcctcacatccatatatctgtgcatctcttcccactttctcttcctaccaacttgagcattgctttcctgctcacagaggatttcccttgcagagaatcaggcttcagtttcaggtacctcacttgcaatagaggagtactggcagttttgtattcctgattttgtattcgttttttcttaaagaggccaccaccccaaattgcgtaaacatggatccccctttggttctccctcctctttctctgtaaagagagtccctgtcctatgctctgaaaagcctcccttctccacgcatcttgatctctgcactcctgtagctccacatcctccccattactgtccctcttcctgggttcccttccatggcctggagacacaaccaagaatcatcttttttttggaaaccctatgtttttaccaccactctcccatccagtcccaactgagtcctctgccaaatgtattcaaccatggctgtgcccactgccttcacttcccacccacccagtctctcagtggcccctggattctgtctctggccctagctgctgtcatgaaacttcagtttcaaagctgacatcgaggcctctctgacacctccctctccttaagaccctcatcttgttttctcttgccaagtgttgttccaactccctcctttccaactactcctcattcccttccagtgcaaggctttgtccttgggtgatgtctctgcaatatcctttctacactacagagacctcgtgcaatcacagatttagcatttgtgtcatccaggcactcttcaatctgtcacttgagcttcgacctctctcccaagctaaaaatcatttcactgtttctatcactaaggccttcttcagatactatgtgctccatgaaaccatcttgatctcttgccaatggaaacaactgctccttcttgtaaactgtgttcacatttcatctgtgtttccaagttctttctgcacctttctgatgcaaattcccgttttctgtgtgcatgtcttgtctctaagacgtgagatgtatgtacatccccgagtgcctagcacaataccttgagtgtacctgttagggctgaatagtgcctcttcccccaaaattcctatgttgaagtacgaatcgccagtgccttggaaggtgaccatatttggagatagtgtctctgtgggggtgattaagttaaatgaggtctttagggtggccctaatacaatacaactttggtgtctttataagcagaggaaatttggacacagacacacacagagggaaaatgatgtgaagacacagggagaaggtggccatctacaagctgaggagagaggcctcagagaaaaccaaccctgccggcaccttgatctcagacttccagcctccattaattaattttctctctctccagtgagaaaattgatttctattgtggaaattcattaccacagtctgtggtactttgagttagggcagccctggcaaactaacatatcagtaaataaaaatttgttgaagaaggaactctgtcacaccggccttctaaaaggcctttagaatgtcttcttacaattgatagtgtctgacctcattaaccttctcatcaacgtcttctacaacctgtcttcaacctacttttccatgttcctctcccaggacacaaaccatctacaccagccacacaccagactctttacagacctcaattcatcctctgatttgctgtctccaaggctttcttcaagatgtggccccacctggaacggtcacttctccttccaaaccccaaaaacacttttgtgcttgttatttgataatcatgatttgcaatattctattcgtattgtttatgagcttttcatgtgcaagtatttcttctctgtaatgtaaacttcctaataacaaaaactacatttgatgcttctctctgctcttcacagcatggaacacactgtctggctcaactaatatttgttgcctaaagcaggcaccatgagaaggaaaagtaaatcgctgcagcctgagaaaatgtggtaccctcaactgggtaaaaccatcgtaggcaacatggctcatggtgcaaggttcttaaaaagaagaaacaacattgcttgcttcagcagcacatatactaaaattggaacaatacagagaaggttggcatggcccctgagcaaggatgacatgcaaattcatgaaacgttacataggtttttactataggtaacaatacattatatagtttcaactagctagggggaggatattgaatgtttccaatccaaagaaatgatcagtgtttgagaggatggatatgctcgctcattaccctgacctgatcaccatacattaaatgtatcaaaacatcactgtccacccatgaatatgtacaattattttttgtcaattttaaaaaataagacacaacaaactatatgcagcataatccacagaaacaataagagctccaagactgatatgaaggaaaggaagagctccttgtttatcttgaaacatatgaattctgctggactccttcattttgtagtcattgtaaaactcttatgctttcagcacttaaaatttttcaatatcagaaacactttgaactacctaacagtttcctgtatttggttttgtattccagaaaaggggtctaaaatactttaacagaaaacatttctaccatatgttctaataataaattcacttcctagttatatacagcgatccattaaactttaataataatatttttgtttctattaaagactaagaacttttcattacatagtgccttctttgtgttccaaataccagtggattccaatttcattttgacacctggctacctggctgaaataaatggcatgctttgtgctgttttaaatttttcttgctctgtgtggccaggctgtcacatgcctatggtgcctctctgggagtggtgagagatttgtagtcccagagcacaccgctctgtccaggtcagctaaggggtaccactggcggttgatttacctttgctaagtgcgtctgaatcttattcttagcatctgcagtctcagcaatgcgattggtgaaagacaagttcactttgttgaattgattccacatctcattggcagtcacaaccaagaggttttcaatgtcgtctcttagcttagcggaagctgcccgttcactctgggagcggagaatattgtcatctgtaaatttggcccaggactcaggcactgagacactgaaaaagagaagcagaagcagacaacagtgagagtgatgaatcagcctacaggatcgctaggcaatcatttatcctgagagagagaaacccccaggtcgctgatcctagcttcattatataaatgtgaatatcagaatgaggcttattttcaactttccttaattattccttattttactgctaatcagttttctatttatctaaagcgtaagctggttcttctgccagtttcaaggggcaaaaggattaatgaatgatgtgaacgtgtaggttcattataaatgtgtcacacatcacatcaataagcatatgacaaaatactcagcctcaagggtaatcaaagaagcattaatgaaaacagcctactaaggaaatattagcaggagtagagagaatgatcatttgcagtgctggcgagcatatttagaaaaagtttctcttgtatcctacagatgagaatgttgaattggtacaaccttcctggagggtaaagaggcaacacaaaccaacagcctttcattcaaatgtggaaaacccagaacttccacttctagaaatgtattataaggaaacaatgtacccaaggatatacgtgtgaggatattcatttcagccatatttatgctgatccctgaaaaatgagaaactacctaaatgctcaaaagtttaaaacaaaaaggttgattatggtacattcaaaaaagtaatccatataccaggcaaattcatgttaaagtagaatatttattttacagacaatgttactgaaaaatcagacaggctatatttcaactgcgtgcattgtatggtatgtgaatttcaatcaagttaacttttttaagaaagtggctggaagagaccatggatcctgcccaaaattgcatccaggggcctggcaaagaaaccactggtggggtaagttgaacaagctgtggtaggaaaggcatcaagctgttttcagcctgtatcccacagcatccagggcatgctatacaatggcaacttgtggcttgtctgtgtttttcttttttttttctttttttgagacagagtctcactctgtcacccaggctggagtgcagtggcacaatctcggctcactgcaacctctccttccaggttcaagtgattctcctgcctcagcctcctgagtagctgggattacaagcacccaccaccatgcctggctaatttttgtatttttagtagagacggggtttcaccatgttcgtcaggctggtctcgaactcctgacctcaactgatcctcctatctcagcatcccaaagtgcagggattaggtgtgagccaccgcacccggccttgtctgtgtttttctaggacttctgcatcaggtagggttattttcatagttagaaaatataagtaacaaatattactttacaaaagaattcaggatgcaattatcaaggtctgaccacagaacgtgcttgcttactggagacttgtccaaagctgggtgtgtttctcaccttcagatatcttaccttgctttccattttaacctgtaagctgtgtcctttcgaaaggagaaagagttaaatgacatcgaaatcacagccgtggcgtgtgcctgacttacgttgcatcgaccctctccactccgcggaagtagccgacaccgtctgatgtgttgcgcaggtggtggcatttgtcgtcgatccggtaagccgtctgtttgtcactcaggtccttttccagctcatgctgggacgctctgttggctctgcaatacagagtcgggaagtggagcttcacactcaggtgacaatgtcctgcaaggacacatgagtgcccttccatattgggacctctctcactgttgctctcaccatctctccctcttcacacagcgttcaatttctcagtcaaaacgagcactctctggatatgcccatacctctacgtcactgggaccctaactcccaccttgtctacacttctcctttcatagggtgggatggaagtgggtagagcaggtgaagataaacaggggtccaggatctgcagccccagctggggcccatctccctaaaacacacaaactcttccagacaggacacgggttcaaagtaatctgtccacatctgtgccttccattccttccttttccttttccttttcctcttctatatctcagctcccttttcctccattatttgaatataaatccccaagaaatcatgaggcctttatagccgagcctcctgccatccattggtaaccttggtttgtggtcatgctgtggctaagaagtttgccaggagataaaaaccaaggatcaaaattaacctccagggcaggagtgagagagggcttcagcagagatcgggaactaatggtccacccaggctcacacactccagcagccaccctgctggaaggaagaggcctcagtaagctctgagatgtatggtcttgcctgcactgccaggcagacaggggacccacagcttattaccaaagacagaccctgggggcaggcatagatgacaggtgagccacatggaatacttcattcgacaaataattattgagtgcctcctatgtggcagacaccattctgcaagcctgggatgcgtcagtggacaccaccaacatctcttctctaaggagccgacatgtttctgggaggagacagcacattcaatgaatcggcaatttgtgtggttcgaagaacaatgctaaaaacaaagcaggagaaaagagaccaggactgtggttatgattttaaagaggatggccagaataggtttcaccaggtgacattgagcaaagacataaaaaaggaggaatcagatcatgcagggccctaatggacatgggaatgaatcaggttttccttcgagtaaaattggaggccattgacttacaatttaaaaggatcattctggtgctgggctgagaacagactgccgggggcaggaagacccattagggggccactgcagttactcaggtgagagatgaaggcggcttggaccaagaggatgaaagtgaaggaagcaagaagaagtattcagattctggatatggtttgaagatagaaccaagagaatctcctatgaaattgaacaccagtgagaaaaaaaaaaaaaaaagagcttgagtcgttggaataatggaattccatcaactaagatagggggttggctggggagggagaagctaggggagaagatggaagttcagttgacatagtaaacttgagtgttcactgaacatctacatgggagacatgaaggaggttgttggaatttgaaagagacatctaggctagagataaaaagtagggagacactgacagataaccagtatttgaaaaagtaggatagctgaatgagcttgggaatttctatattctcagcacctaaaaatggttttggtagagcaaagccgttcactcagtaaaggctgtgttgaatggaatgagtcagttctagctgcaggttcccttcaacttagcctgtgctttcaagcaaatcacttgacctctcaaagctgtttttcttctttgtaaagtgtaaatgagagtagcgacatgcaaatgatctgcactttgtgaattctaagacagtatacatgtgcgaaggatgaaaaaggaaaaagctcccttcccttgctacttctgtgctgaggctcttgccttaggtgattatgctgaaattctaggactagaaggcctttctcctttggtctgggaccaagatgtcccacaagcttcctgtcttaagctgagaccctgttagagaaggggctgaaatgttcatgaagcatctattgttacagttcacctcttgggaggtggggcttggggaggtggaatagagacttcacagccttttacttcccatcacctcaagtgaaaatcccttctcgtgcacactgtcaggtcttggctggaacagtggttgaaaacatatgccttgagagtgtggaatgatgaacagtggggctcaaaggaggggagggaggagggtgggatgttggaaggttgcttagtggttacaatgtgcggtgctccagtgatagatactctgaaagtcctgatttcaccacagtgcaatatatcaatgaagcaaaattgcacttgtaccccatgaatatatacacattttttacaaaattaaaatgttaacaaaagccatatgcttcagcatcagacagccctggttcaaatgtctttgctgcttgctaaacctgaccagaggaaagttataaactaatggtaataatacccgtctttccaggctgtccggaagataattatgtgcctaacagatgctaagtgctcagtaagtattaggtctagtaatattgtaacatgggtgatttttatgactttagaactggggctgcctggacaccctctgatctggcctcggagtctgcttggacaggcatttaaggcagcatcccatcaccacgtcttacagcccaagatgggaagaccttggctgccctgttagtgcctaatgagattctattttcagctgagatccaagctgagggtttcattgctccttctgaaacaagtgtagttgataaactctcttccagtcacctgccctggacagatcacagtggccgccccacaaatcctggagaagccatcccgggaagtgaggtaggcattatgcccactgtgtattaaaggaaagccaatctccttaaaggatcaacaacaaagattccaaacaggtacaaacacacagaactttctgcaaaggtctgcaatacagccagtattgaggcaatttgtaacagggatttacatgagatgaggctgttccacggtagaacaatctaggccaagaacagccaagaacacaaaagatgggcagcagattccagactacgaaataaaatgcgaattaggaactagaaccaatgctttgaaccacactaaacatgtttctaaaattcctggggagcagaaaccacgtacagtcatccttaactactcttttgcttctcctcaccaatttccaaattaaaaaacccttccagtcacagctcgagagaatctcagcgtacaaacctctccaaccttcgtggtgttcagatcctgacgcacaggatgggcaaattaaatgagcagcatggacgcttttataacacacataatcacctctcttattgggtggcatattcgacactacttccttccgtgaccataagcaaatggcactgatctttctacttaatgttggccaacagtctcggccaatacttttcctatgctgacagctgtgatcattgcctgagaccttctttattattattcttccccctcctaactcctcatcccacccccaaccataaatattaagtacctactatcaccaagaaaagagagcccatcccctggaagaatgtgtattctagtgaggaataggatgggttaacagttacaatgctgtgggacgcagggagcattgcaagggtgtaatcattgcagaggtcggatctctttttttttttttcttttttttttttttttgagacggagtctcgctccgtcgcccaggctagagtgcagtggcgcaatctcagctcactgcaagctccacctcccaggttcacgccattctcttgcctcaacctcccgagtagctgggactacaggcgcctgccaccatgcccggctaattttttgtatttttagtagagacggactttcatggtgttagccaggatggtctcgatctcctgacatcgtgatctgcccgccccggcctcccaaagtgctgggattacaggtgtgagccaccacgcccggccgccgcagaggccagatctttaaggaggtatggaagataaacattcaagtaaacgaccactcattactttttcaaatgttagagctgaacaagtataagtcaatctcttatgtaaaaaaaatgccagtcttttgagttaaaagaaatcttagttacactcaagtgagggcagaaatccttcccacagcatctcagaattatttatttaaataaaaatttacagcaagtactccatgtacttattttttaaaaatatatttttcttgagacagagtctgtctctgttgcccaggctggagtgcagtagcacaatcagagctcatcactgcagcctcatactcttgggcttaagcaatcctcacacctcaacctcctaagtagctaggaccacaggcacccgccaccatgcctggctaatttgtatcttttatctgtagagcagaggtctcattacattgcccaggctggccttgaactcctgggctcaagcgattttcctgccttaatttcccaaaatgtctatttgtattattttaaaaaatgtttatgggtacataatgggtatatacatttatggggtacatgtgatattttgatacaggcatacaacgtgtaagaatcacatcagagtagctggggtatcaagtaatcatcttaacatttgaataaaaatatgtgtatatgcctgtgtgtgtgtccttataagaaattaagagaaatttcaatgaggagcatgaaagtatagttcaatgatagattttgaattgtatagagacataaagctcttacgcaagttgggcaatagccttatccaaatgtagcttcattctttcttgacaacacagaatagtatcaacttcctactcaattggaaaaaaaacatattaatgttttcattattgaatataacactcaaaatcaacaatgtaacaaacatcaatgaaggaaaattttgtttcttaaaatactgtgaagttaaacaagaaaacaattttgcttccacttatttatctacatgctccatgatactggaatctaaatatcagactaagatgcagccttcataggtcggtccatggggaaattatattatggaacaagtggggacatggttaaaattttaggatttttctctctttttatccctgtccttaattaaaacagtaaaaaaaaaaaattctggtaatatacaaggtcaaatttaaatgcacggcttcttctataacagctgttcttccaagacaaagtaagtcagggaggaaaaaagcacaaccaaaagaagcttctctctggcagtacatgtatcctccagaagacagtgcttgggtccaaacatggaggctgacttccaccctgggaggtcgccctccggtcctgcttgtgtactgcagcccagctcctgtccttgtacaaacacctgtgctagccaggcctctctactggaccacacacgttgccttttgatgctgctaggatgtatccactagcccataacatgtcagagactattaaatcaacatttatttcccccttgaaatttctatgcacgttagaaaatgtagcacattatgtatgcacattagaaaagtgcacattgttactgttatcattttctcagccaaaaagttgtcatactatgcatactgctttgggacattttaaacttgaacattttctcatgacattaaaaagtactgtgatgaatgaccttgatcaatatttagacaccaccgaagagtatgcctttttccaaggttttgacaagtacagccaaattgcctttcagaaaagtggtactcatttacaacaacaaatgaacacgtgttttcttgtcttgcccagcaagtggccactgttactcctttccatcttcaccagtgtgatggaaccacacccccaccaccccaccaaaagcagcaaacctgcctaaatttgcaagctgatattatgagtattcatttgttcaccatttgccttttttgcttgtgtcaactacctgttcacatgcttgtccactttttctgtcatttattttttctttttcatttgtgagggttataaacatgtttaaaattcagtcttttgtgttatatatgtcacaatttttttaatcaatttgcctttggttttataaatgtgcgtggtgcttttgatatagatgtttctgatttctatgatatcaaatctatcaaatatatctccttttggtttctgcctttgttacttagacaataaaggccttcaccactccaatatgaagtattactcacctatgtattgttcttcttttattgtttaatcgtttagtataaaaatatcaaatatgtctagagtgatcaccctactgtctggttgtttggtatctgaattaatggaataaaggaagagctaaattcccttcacacattgacaccaacattctccctgccttgacaagcaggcaagatttcccagcctcacagtaggttgtgcatcagtcttagtatttttgtgttcagtttttatctttctcagtgcctcatgagtatgtgtacctgtgtgtactttgatgaaattttaacaaaagatgcatggagtcctgcttagaaaggaccatttaaaaccccaaattgtgtttttatcccttgtgtacacaaagcacagagtggaaattcttaggacttttagtgagggaaaaaaaatgcatttaatgagactcttgctgtaaaaaattcctacaacaataattttttttttttttgagatggagtcttgctctatctcccaggccggagtgcagtggcgcgatctcggctcactgcaagctccaccccccgggttcacgccattctcctgcctcagcttcctgagtagctgggactacaggcgcccaccaccatgcctggctaattttttgtatttttagtagagatggggtttcaccatgttatccaggatggtcttgatctcctgaccttgtgatccacccgcctcggcttcccaaagtgctgagattacaggcgtgagccaccatgcccggccaacaataatttttatatgtgaatttaaataatgtcatatgatgaatgccagatggttggaggcagaagggttcacaagaatacaaaaagcccaaagccaaaggcctctggcactgtccccagtgctaacttatccttccatctgtacccatacatggaggtggccttgaaataccacaatacagcaaaagaaggacaaagcattccctcacctgcccaagagaagaaagttgcaaaaaggtgggggatacacacagaaagcagaagcgtaggaagagccttcatctaactagatctctggctgctgcctcacacctaaggaagtgaaccgtacatttaggagcctggaaaatgggtccaacatttccagatccctgacttagggagaaattacaggccccatgagttacagggtcacactgacttcattgagcttctcagattgcagtgactaaagtgattaaaatgcagtttcatctgtggggctttggatgaaaacaaaacatggaatcatgtccagttgcttgaagaaccttgaatgcatcctactatttgagcggctgaaatgttcatgaagcatctgtcgttacagttcacctcttgggaggtggggcttggggaggtggaatagagacttcacagccttttacttcccatcacctcaagtgaaaatcccttcttgtgcacactcccaggtcttggctggaacagtggctgaaaacatatgccttgagagtgtggaatgatgaatagtgggactcaaaggaggggagggaggagggtgggatgttgggaggttgcttggtggttaaatgtgcgttgctccagtgatagatgctctgaaggtcctgatttcaccacagtgcaatgtatcaatgaagtgaaatcgcacttgtaccccatgaatatatacacattttttacaaaattaaaatgttaacaaaagccacaagcttcggcgtcagacagccctggttcacatgtctttgctacttgctaaacctgaccagaggcaagtaataaactaatggtaataatacccatctttccaggctattgggtagataattatgtgcctagtagatgctgagtgttcagttaagtattaggtctcgtaatattgtaacatgggtgattttcatgactttagaactgaatcctcatgtaagatgtgggctctgctatactgtcagctgaggaatatgcaccacatcacagaaacattgagttgcagccacaaatgtggatgagtgctgaccccgcgctgtggcctgagttgtggatataaaatcattacttggatgtccttgttaaacccagaccctgctcccacaggttgaggctttatatgtggttctatttacctgtgttaactgagtctttttacatcttgggaaagtgggtaaacctcctgtctaacaggtgaatgggctactgaaatcaaatcttcaaagtcaagctgcaagcctgaattgaatctagctaataagcaaataccacctataggtgcagatatttcatttccacatacaatgctttttaatgatagattcaccaaatattcttgtcttctcacttatccttgagtatagtgagcagaggcatttcctttcattagagatctgcattctcagtatttattcctgagttcagccaagatgacccatcagctaccctttctggcatggctgcttgtgagaagcttctggtcccacaacctgcttagaggcagaaacctaggtgaggagtatagttcttattgctgggggtgagagcccacccagatcctctttccgtgctggttgcaggatttctattcaatcctgtccttagaggagaaccgccttggactggactgggctgaaatgctgaaacgtctctccagcagcaggtctgacatctctggaactcattggttgcattctcaacaaacgtctgaggctggagtatttttgctttctgcttctgcagcatggaggaaggaaaagcctcttgtgggaaggaaactggccagctggggccaggcccagagccccagcctgagttctgagcagctgtctcagtccccatcccagagccagaccagggcaggctgcagggtagatgactttgcaggttcatttggctccaaagtccaaggagtcagtacggtctgggagtgctaagaagatagtaccatgattgcctccccaacagaagccatcctgtaagaatttatcaattatcaccgactgaacgtaatagtcaacagaattcagcagaattcataagaaaatatttcgttgcatccatgtttttcaaaggtaggtcttttaaggctacttctttcctttgctaatacacatttaattattctaaaaattaagacctactttggtaaaaaataaaacatatgccaatatcaataccttgagtaagccacagaatgcattcactacttgaattaactggcaatgaccgaagctcctccctcaattcatgaaccattactctaattgcacattcagttttttgagataaagccaccactgtcaggtttttgagataaaggacccccctgctactgacctagaaactagaaacctctaatgcagtggttcttgtttttaagaaacagctttgttgagatataattcatagaccatataattcacttgtttaaagtgtgcagtttgatggtttttagtacattcgccgagttgtataatcatcaccggaaccaaatttaaaacatttccattaccttccaaagaaatcatgtgcccattagctgtcacccacaatttccaatcccccaagcctcctttcataataagcaaccacaaacctacttatagtctctatagatttccctattctggaaatttcatataaatggaattaccatatgtggtcctttgtgatggcttctttcatgtagcataatgttttcaatattcatccatgttatagcaacagataagcacatcattccttttttttggcagaataacctgttgtatgactatcttacattttacttttccattcatcagctgatagacatttgagttgtttctactttttggctgctatgaataatgttgttataaatatccatgcacaaatttttgtttgggcatatgttttcttttctcctggaatgatgcttgggagtagaactactggatcctatggatcatacagggtcattcatgcttaagcattttccaaaggatttgcctcattttacactcccatcagcaatgtattagggttctaattcctccacattccagccaacttgttattttctatattttttattagaactatcctcatgggtatgaagtcatatttcattgtgagatcctttgcccatttttaattgggttgattttttttaattgtgacagttatttatatattctacatacaactcttttcactttgttgctagtgttcttcaaaatacatttttaattttgatgatgtccagtttatctgcttttccttgtgttgtttgtgcttttgatatcacatctaaaaaactgttgcctattccaatgtcacgaatattcatgcctatgttcttttctaaaagtcttacagttttagctcttatgtataggtctttgatcccttttgacttaactattttgtatgtttgatttggaatccaacttcattctttcgcatgtggatatccaattgtccaaataccatttgttgaagacactcttcccattgcattgccttggcatcattgtcaaagatcaatagatggtaaatgtgatggtttatttctcaactctcaaattgtgtccattgttaggcaggtactacactgtcttacatattgcagctttatagtaagtgttgaaatcaggaggtgtgagtcctccaactttcttctttttccatattattttggctattcactatcctttgaatttctatatgaattttaggatcagctcaccaatttttacaaagaagtcagctgggattttgataggaattgtgttgagtctatgaatctagttgagaaatattgccatcttaacacgaacatccatgtttatggatgttcccatccatagacatgatatgcccatttatttaggtcatctttaatttctttcagcaatattttgaatttctgaggcacttgttctttactctgcctagtcattaagattacctgggggatattttaaaaagatcaatgcctagtccccactgcagatttgaatcagcatctctgggtgtgggacccagccattgatatttttaaaatctttgccaggtgattctaacatgtagtcaggtttgagagccactactcaagtaatggaaacactaaatgtagccaagtaccaaaaaaaatctgttggaaatatcatagtgtgtttgtgggcaaggtgatgaagttaagctgttagaactgccttgtaatttatttcatacagaacatctcaggattagtgagaacaaaagaccacaggagagatgatggtaaattcctatccagttaggatgacaaagtaggtgacagattattttaaggcttgtgagattcatcaaagcctgggaaagaagaaacagaagagtggagacccatcactgcaaaactatttcattcagaatgttctatttctaaccactcctgtccggcaatagggacagtgacttttacagtagattacaaaacctttctgtagtagccaaagctttcctgagtatattatttcaactcagagttctctcagagaaccagacagtagaggaaaggaaagagcaaagaaaaaagtctgcttgtcatctttaatgtcatgggtcactaagaaaatgtaagtgatgttaaagcagggtgttgatgccgtgtggggataaaactactctgaggactcggctgctaccttgtcatacttactttcctaccaaggactcaattctcaccaaggaccaattaaaaagaggcgaagaggtgtgaccctgcaaagcttgtgcagggacagagaagatggattcactgcagcagaaattctgtgaaattagacagggaaatgaagctgagaaatgaggagggagtcagacaagagaggccttagtggatttttctcctgcagaaattagggagtcaaggaagagttcatagcagagggaagaaactcatgagaatgtataggatagatccaagggaaacttggggaaggaaaggtgctttggaatttcttatcaaccaggtatttttttaaagagctggaaatggattaaaggagtttgggagacaacgggcagcaagccatggtgatgaaggaacactggtaccatcaatagaaagggacaggcaataggctaagcaggctttatgaatgtgaaccagaagaaaaaaagttaccaagctaaaaaatgtttggcaagtacttaggaatgaagaactaatgctttataaagtgcctgggctgaaaaaagagattgggaagggctccaggtacatgatacttgaaatcttaagaaatgatagagatctgtggtagcaagtctaagaagtgaagatcagagaaattagaactaaaccagatttaattggtggaaggtggaagagagattagcgggagatcagcagagtagtgcagatgcaactgtaagtttctggatggcaatttggctacatatcaaaagctttcaaatgcatagaacctttggcacaacaattacacttcccaaaatatattctaaagaaataatcaggagtaactacagttatcagtaataatatttttgtatactgcagtgctattaaaataggaaaacaaaggagtgggatagggaagcaacctaactatataagagatgattgattgaaaaaaaaaaaaaagatagcacctttacattgtagaacactgcctaaccattaaaaatcatgtcttaaaagaatatccaggctgggtgcagtggctcaagtctgtaatcccagcactttgggaggctgaggcaggcagatcatgaggttgggagttcaagaccagcctggccaacatggcgaaatcccatctctactaaaaatacataaattagccaggcatggtggcaggtgcctgtaatcccagctacttgggaggctgaggcaggagaattgcttgaacctaggaggcagaggttgcagtgagccgagattgtgccattgcactccagcctgggcgataagagcaagactctgtctcaaaaaaaaaaaaaagtatctaatgatatggtaaaaattaccccaatataattttaaatgagtataccctattcaaatttataaatacaatgatctgaatcttggagacatatctgagcatcattgtgtgagttaggtggtgcctatctaagaatgattaataaaaagatgcaacggaatggtagaaaaaaaagcatgattaataaaaagactgaaatactccaaaattaatagtgatttctgtctaataaagcttcaagtgattttcatctttatttactcgtttgcattttcatattctcattgaatatatgttataaccaagaaaaacatgtctttgctaaatgctatcagcatctgatacgataatgctttacttataagtcattttatgtaacatccttttttgcttctacatattcaacatacatttacaactaagctgcctgtgactgatgcatttcccccacatttaccgtcagcagttgtgcttcaacttcatcgtgaactaggtcgattcccattctcttttctcgatgaaatagacattctcgggctacctacagatacacagataatggaaagcactaataaaaactgacaatccatgactagcagctctaataatttgtttcaaaaataagtcaatagatactcccaataccaacttttccagcccttttgtgaaaatctagcctgaaacagactgtaacaactaaatgaatctctgctgctagttaaaaggtaaagaggtagctcttcaaaatagtttgaaaatattcctatcttggaaagttgacaaaatgaagtagatggcatttacttgatccccgcaaattagcatttgagggcattagttggcattactttcttcaggtgagatagttcagtaacatgagacacaagtcttcaagatattatttctaaatattttctactgagaataggaagaaatgaatgattatctttaaaaacatcaaaatttttgtgttgccaaaagtcccagtgattatttttaaagtgtcattgattgttttcccaattatcaaaataatatgcctttactcactaaagagaaaaaatatagaaaagtagaaaatatgatttagccatactcctattactactttgttcgtcttaacaagatagaggttataatgttctcacaactttatattatgctttttagtattgacattaaacagtagacccaaatcatgaaatattctttgagataaagtatgttagtggctctaatggaaaacagcttaaatttctaacaataaattatgtatgaaagaacattatgtagcagttaaaatgcttttctcgaagactattccataacataggactcccaaataatattaaatttttaaaagcataaaatataatggtatgtatactataatccagatatactatcactgaacaaaaactttaagtgaatctctaattgtttaatagtatcacttaccagaagaagaattaacgggtagaggggaactctgattattttgatatgtattaccaaactgcttcccaggaaatttctaccaatccatagccccaccagtaatatatgaaagtgcccatttgctgctcttacgccagctctaaatgtcatgcattttcattattgcaaatttgataggccaaaggtagttatttcattgatttaatttgtattttatcattaagctttaacattttttcttatatttgttgatcgcctatattttctctttggaggcttatctgttcatgtgactcaatttaaaaaggaccctctaatactgtgttgacaataaattttcaaacacacaagaacatctggacaaaaactgcagaaaaaattcaaattagaaccatctttctgaaagtagtcatcactgaaagggttactaagagaagaaactgaatctccactggaaattaagaaagtagctatcattttaaggatattttcaattcttaaaggcagtcaagggtaggaagaactgtagaataaaccaatacttcagagtaatctgatgctcagggaaggcgtagaagcccttctgattctaaacaaaaatttatgatgaattaattcaaaaagatcattagtgaactatcagccattctcaggattcctggggattgtgtgcctctgtatgtgtttttgtacagcggggaggggttgcagtaggaagtgacagtgcgcagggtgccccaagaaactcctccgctcaccagactttcagctccttgattctctaaactcttctactacagatgctgtggtagagaactacagcaagtgctcatcacatgggaataagtcatgcaaacatgaggaaaaatggtgctagctgtgctcatcaaaatgtatacttctaaaataatttgtataatttgcacatcttcaaacatggaatgtcttctttcaatggaggagggtggaatggggttggagggcccatcgcatagcctgagggttagaggtgacctgagcccattcagaagcctggtcagaggccagtaaccaactgaaatgctccctacattactatggcaactggccaatctcagcaccatttttctatttaatcaagcaaattccatgccctaagatggtctcatttgatgatgtcactacatcctaaaagggaatcataacatatatacaggaggcgtttcatgatacagactaaaaaaataaaggttttggtctcaaatattgtttattttaatttagtgacagcaatgatgaagcagcctatttaagagataagatggtcatatggtttggatctgtgtccctgcacaaatctcaagtcaaattgtaatccacaatgttgggggtggggcctggtgggaggtgattggatcgtgggggtagatccttcatgaatggtttagcaccgtcccttcggcgctgttctcaggatagtgaatgagttctctggagatctggttgtttaaaagtgtgtggcaccctcccccgttctctcttgcccctggacccttcatttaagatacctgctcctcctttgccttctgccatgattggaagcttcctaagggctccccagaagcagaagccattatgcttcctgtacagcctgtagaaccaggcgccaattaaacctcttttctttataaattactgagtctcaggtatttctttatagcaatgtgagaatggcggaatacagatggcgtgttcaccttaaaacattgtgtgtcctaatggtgtctatttaattggtcttctttgctttgcattcagaattacctcttaaagtggttgttcttaaagtatataatgcatttaaaaaaaaaataggcagtggttttgccattgctgaaaacagtcacagatttattgatagggggttggcttcaacagatgaagtaaaacataagtcaataaataaataaccacagtaactcaaccagtgggttataatcataaaaattcagtgtgttctatcataaggtcttacctgaagaggggcttcagtctccatcaaagcccgctccagtcttttcttcacatcagtaagtgcatttgtctctccaatcatttcatccaactcatgaatgatttcagatttccaaaaccctatgtcattgacacgttctcccagattttgggttgtgtctgcctgagtttttcttgtttgttgatatttgtcttgaatcaggcgagatgtatccactcttagtttctccgaattatgtcgggaagtgttggactcttgatagttggttaaattggacctgtaccagtcatccggtgtgtatcttgtgaagaaagtggttctgttggaaacaaagggaagcatggtattctcggacaccctctgtgatctggtgcagtacggggccacgcttggggaattggaggcgactttgtagtatgtgctgggtctccaaggaaggctcaggctatgggtcaaattggagtggggaaagcggtccctgtagcttgaggccatggtactgatggctggtagaaagttggttggtgttggtctagggtgggcgtaagttgtcgttaaagtacaacctacacgttccatgatgccaaaacactatttgtaaatctctcctgttaaaaaataaaaagtaaaataagacagtcacataaaataatctctggtgaaacatacagataaaaggccacatctgacttagtatcagttgcagaggccccgaacacattagatgcttgttctcatttgttatccacattcaccattgataatatattccaacaaagtttttttttaatctctatgtctctagaatgtataaagatcacatttttattggccatttggacttttgaatttttgtgaaaattatgagagtaatattgtcttgttgtaacaaattcaaattaggagcctaaactatgcatcttaacggatagggattcaaaatagatttctcacttgaagtcaggagttcgagaccagcctagccaacaagacgaaatgtcgtctctgttaaaaatacaaaaattagccagctgttgtggcaggcacctgtaatcccatctactcaggaggctgaggcaggagaatcgcttgaacctggtggcgggggtggggggcagatagattgcaatgagctgagatcgcaccactgcactccagcctgggctacagagagactccgtctaaaaaataaataaataaataaatagatttccgtctcaaaccatgatagactaataaaaactagacttagcctcttatatctaaaaatctagacaagaaactactgatttcagacattggacaatggacagcacaggactctgagccatgagaaaagagaaacaaggtgagcccacctatttattagctatgtgacactgggtaaattacttaacctctctgtgcctcggttgcttcacttagaaataatagggaataataatagcacttccttctttggactgttgtgagcagtggtagcagcagggaattgcttggcaactccccgcccctgcccccacaagtcatcctaaataaacactccatctggatgacaatggtgtggttgatatgcaaacgcagctcgaggcaagtacctggatctcctttcctggcaacctacaacctgtaagcacctcgaatgtataacagaaatcctagggaagccatggggttatgagggctaagacaatgctatgtatttagaaggattagcagagtgtcggacacatagaaagtgtgcaatagatcttaactttttaaattgctacctcagagaagtagataaagtaaaagaaaaatatccttcctccccgcaaaggtgaactcctcagaagtagccactaaatagttcattaatagttgtatctttccagatttttcctattcatataccaacatgtgtattatttatattttatatacctctacctatataccatctatacctatatacaaagctttttaatacaaaaactgaattatcctaatcatttgatatatcattgtagatcttttttttttttttaacttaagtatattttctgggccactccccctgttagaacatacagatctacttcattctttttaccagttccattgtctgaaacttttggtcgttattattccagaaagccaaggatgccacagaccactacgtatcttttagcatttaaatgtcattctgttttggggttaatgtctatggacttttttactaaaaagcaaaactacaatcagatccaattctatgcactgctcagaaaaataaaaattctttagtgactacttaaatagctatgtcttgaggactttggtacccaagtacaaaataatctatctgtagaattgcgttcaagtcaaaatccacacagatcacatgataaaatagctgcccgtggccctgtgcttatagaaccctagttctctttctgctaaattcttccttcctacggcccccaaacgtgttatactggccaaacttacagactgatggtaaaaacaaaagccttagttaccatttgcagttctttgcttcaatttgaaacttaaacattactttttgaaaaaggaaatttaaagtactgaggcattagggtccttaaagttgtctttagttccaaccccttccctatgtcagatcaataaataatctggtttatttctagcaagaaacttcaagtggtgatggaccactcctacttggctttggtttattttattttattttattttattttattttattttattttatttttattttttagacagagtctcgctctgtcgcccaggctccagtgcagtggcatgatctcggctcactgcaagctctgcctcccaggttcacaccattctcctgcctcctcagcctcccgagtagctgggactacaggtgcccgccaccatgcccggctaatttttttgtatttttagtagagtcggggtttcaccatgctagccaggatggtctggatctcctgaccttgtgatccacccacctcggcctctcaaagtgctgggattacaggtgtgagccaccacgcccagctggtttattttattttcagagacagaatcttgctctgttgcccaggctggaatgcagtggcatgatcactgctcactgcagccttgaactcctaggctcaagcaatcctcccaagtagctggagctacaaacacacaccaccatgcctggctacttttatttatttattttagtagagatgagcaggtttcactatgttgcccaggctggtctcaaactcctggccacaagtgatcccccacctcaacttcccaaagtgctgggattacaggcatgagccatcatgcccagcctgcttaattcttgacaataagagatccagaaaccaatagctcacttcatccttcaaccatggaatttcacgtgtagaatgccacgtgagttttcccagcatttgttatataggcatcttgagacgtctcaacccatgtttgaaatgtgagtcatctgctccaggggtgatatctgaagatgcagaggtttacacaccagatgagatatgtggactgagaaaaacaaatatagtttacaaaagcacctggtgatgtgttttttaattagaggtgagatttgtcttagaatctggaatctaaagcataaagcatagtggtttacagatcacagaagtagaactcctcatgtacggcagtcagtttcatatggagagaatattttacagccacacctgaagttctagctccaccagccatcttgtaagccattcaggaagactgaataaaagacatcacgtggggatggtttcaccaaaatattccactgtcatgcattttgggccattaatggtcaagaaaaccaagactgtcatgaactaagaaatacttaaaaactgaaaactgatttctacctccaaccatgacagaataataaaaaccagacttagcctcttatatctaaaaatctagacaaaatatatgaaacaactgcattcagacctcagacaacaggcatcataggctctgatccttgagagaagggaaacaaataaggtgagccctctgattgtcaaggtattgtgcctaaaggcaattttcagacaatgagaaaaaacatgaaaactgaacagagcctggcagcttttgtgagttgagaaagtgatcagaattcagggaggctgagaaagctagaaattgtagagcaggtttctggaataaagtgagctatgccgaaatagagatccagaaatctacaaagggatctttgtgagtctttgctgagaataggctgcatatgcatcaaggaacactccacaaaccttggcaaagagtgatggcagagctgttagctgaacaatttctagaacttacagagggtggagatacattatgaacacagactaactagattggagggtcattgacaatcacctggagcattcaagggagacactagagaggccacacgttagaggtagggctgaactatacctggagtgaaggtaatgaagactcactctagcaaagcttgaaaacaggtctcaaagatatcaagctaatccacaagtaacttaactacctgacatcaagacactccaatatgtaacatcacaatgtccagcatccagtcaaaaatgaccagacataataaggagctcaaaaatgtaacccctaaagaaaaatcagtcaatggaaggaggcctagaaatggcagagatgatggaactagtaaactacatacaagtatttgatacaaggacattgagaagacagaaatggaagactggagaagaaccaaataaacttcaggaataaaacatacaatatatacttgcacaacttcactacatgagattaacagcacattagaaattagtgagctcagactttttttttaactaaaaaagaaaattaaaagcaccttggtaacctatggtgcaatagcaaaggttctaatattaaggttttgcagtgccataaaaaaaagtagagagacaaaaatatttgaggaaataatggctgaatatttcccaaatttgctgaaaactataaatacctaggtcaagaagctccacaaactccaagaatacacacacacacacacacacacatacgtgcacacacacaaccccctgctgccaccaccactccaaggctcataatcaaaatgctgaaaaccagggatagagagaaaatttgaaaatcagacaggaaggacatatttggaaaaaaagaacgaagataagaattagtgctgaattattgtcagaaactacccaaaccagaagacaaacaacattttaaaagggctggaagaaagtgtaagcctcaaattctatatctagtgaaaatatccttcaaaaaatgaaggtgaaataaaatcttttcataaaaacgaaatccaaaagaattcatcagcagcagacctgcaataagagaattgttaaaggaaattcttcaggcaaaaggaaattataccagatggaaacttggatccacacaaagaaataaaaatgtcagaaatggtaagcatgtgtgctaataagaaaaaaaaaaatctttctaactttcaaatttctttaaaagatcattatttaaactaaaaataaaaaattgtggcattaataaaatagaagtaaattatatggtagccatagcacaaatgataggagggcttagatggccatattagattataagggtcttataactgaagtgaaataatgtcatttaaacatatactgtgataagttaaaaatatgtattgcaaactttagaatagccagttctcaaaatgtaaactaaggacccatgggtatgcctaagacctctttggaggtgaaatggtcaaaattgttttcatagtaaatactcagatgctatttgcctttctcacaaatttacaatggagcttttcagaggtgacatgatacatactatcacaacaggctgaatgaggatgagagcccagctactaagctaaaaattactttgccaaaaatataaaacaatactaaatacttcttactaaattattttttgtttcagaaaaaaaataataaaaataaatgttttaataaaaacattatgttaatgtataatggattattatggttattttaaaataatttatagtttttaatttctagtataataaatacaatagatataatccacataagtaaaagctctttgaggtcctcaatatttttaagaatgtaaaggtgtcctgagataaaaatgtttttgaaccactgagctggagcaatatctaagactaaaaaacaagagttttgaccaataatgaaggaaaaaaatggaagacaaaaaagactcataattattccaagagaaaagagaaccaaaaataagacaaagaaaaaacaggaaaatgatacaaatccaactatgctgataattaaacaatccaattaaaaggcacagattattagaaatcgtttttaaatagcaatattgaactataagctgtccaggaaaaatctcactttaaatataaaacacaaataagttaaaaataaaaatatgggctgggcacggtggctcacgcctgtaatcccagcactttgggaggctgaggctggtggatcacgaggtcagaagttcaagaccagcctggccaagatggtgaaaccccaactccactaaaaatacaaaaattagccgggcatggtggaagttgcctgtaatcccagctactcaggaggctgaggcagagaattgcttgaacctgggaggcggaggttgcagtgagccgagatcatgccactgcactccagcctgggcgacagagtgagactccatctcaagagaaaagaaaaaagaaataaataaaagtatgagaaaagatagactgtttaaacactaatcaaaagaatacagaagtggctatattaatatcaaatcaagtagacttctaaacaagaaatattatcggagataaagagaaaaataaggataaagggatcagtcaaggagatatagcaatattaaatgtttatgtaatcatttacctaactttcaacacctaaagcaaaaattgacagaactaaaatgagaaatagacaaatccacattatatttcaatatttcaacgtttgtctgttagtaaatcatagagcaagtaaacaaaatattggttaatacaatatttagcaatattactaacaactttatggcaagaaatttgacaacatagatgaaatggacaaaatttttgaaagatacaaataaccaaaactgattaaagaagagttagaaaacctgagtagccttgtagtattttttaaaaattgaatctacagtttaaaaactttcctcaaagaaaacttcaagctccaatgggttcactggtgaattctaccaaacttttaaggaagaaatacctcagtttttaaaagcctatggcttactttggtggtgcgcatctttcacaatgattaacttactctctaaattctaactcagtcaattcttttttttttttttgagatggagtctcgctctgtcccccaggctggagtgcagtggcgccaagatggcgccactgcaagctccgcctcctgggttcacgccattctcctgcctcagcctccagcgtagctgggactacagccgcctgccaccacacctggctaatttttttttttttttttttttttttttagtagagacgggtttcaccgtgttagctaggatggtctcgatctcctgaactcgtgatctgccagcctcggcctcccaaagtgttgggattacaggcgtgagccaccgcgcccagccagtcaattcttaagagagcatgtgcagcacatactaagatcattaaccgatgctataaatatctcatacttgcaaagaaacagcaaattctttggaaaaatgactgaaaatagctatggaaaaatcccctaaattaggcaactgcttattatacatttaatcatgatgttttggtttgaatgtttccctctaaaactcaagttgaaatttaattaccattgtgcagtattaagaggtgagacttttaagaggtgattatgttataaggggtctgacctcatgaatggaataatgccattattgtgggagtggattagttatcacagaagtgggctcctgataaaataataaattcacccccgttgtctctgtctctttcattcacttgtccttctgccatattatgatgtagcaagaagacccccatcagatgtagcccctggatcttggacttcctagcctccagaactgtgagcccaataaatctccgcctttataaatcacccagtctctggtattctgttatagcagcagaaaactaagacatgtgcccaaacagaattttaagaaatgagacatgggctacaaagtcaaatacaatgtttgactaggtgcacttaatttacagtcaactgttatttacatactgaaaaaaatgctacaatagtcttccataaatattaacatactaaatatagaatcaatcacacagagattttaagaaccggaaagctccatttgctatccaaaagttggcttcatactgggtaaacattttattagcatatttaagcaagactggaagatcataaatattttaaagtacaaaaatctacagaccattttctgcagaagacacaagtttacatgacttgccccacaccctgccttagatcaggggcaagcataggcttgaagggctcacatacaaacccctttagttcctttgtagccacttaattacagttctaaataggagcggaaataaaacagcgctgccaatacactaacaaataccagaagtagaagaaatcatatcagacatcaatgtttaatttctctttatgcatatattacataagaatacaggaaaacttcatctcttcaaaaaaaaaagtttggttaaggaactctattcatcgatggtatataaattattacactttggagagctagatggtggtatccagtaaagttgaaatggcaaattacctgtgactcagcaattcaatttcttggtatgtacctagagaaatgcaaatatgtttacaattagaatgtacaagaattcctttctagtatttttaaagggagcaaactaaaagtccatcaacaggaggatgcatacataatatgtggtaaattcatgcaagaatcaccacacaacagttcaaatgaatgacctgcaacacgtacagcataaccattctatcaacttaaaaagtaacagtaggccgggcgcggtcctcatgcctgtaatcccagcactttgggaggatcacgaggtcaggagttcgagaccagcctggccaacttggtgaaaccccctctctactaaaaatacaaaaaaaaaaaaaaaaaattggccagttgtggtggcaggcacctgtaatcccagctactcagggggctgaggcaggagaatcgcttgaatctgggaggcggaggttccggtgagctgagatcatgccattgcactccagcctgggcgacaagagcgagactccgtctcaaaaaaaaagtatacattggtttaggataaacatatgagtagtaaaagtataaaaatatgcagaatataagtaaatgctaaattctgttggttaatagggataggtaaggagagaggggaatgggatttccaagggttacataacagaccttaattgtgcctgtaatcgattttttgttggtttaagtttggactgggtacatggattcacccctgggttcactctacttattgtgtgaagtattttattttaaagaagaaaaaagtagaatattttgtcagttacctcaaaacattttcgcctgttagtaaaactgtatatttttttcacaataatcaaacaaataattttacccatttccaggatgtttatttctctacaatactatatacatccaggagaaaacataaaggggtttggtctaaactgcccaaacacaagcgaaagctttgcagccaagctaaacagaaacgactttgggcggtgagagaacagctttgatctgaatttaaggagctcggtctacaagaccaggtgattgaactctcctccccgtggctgcagatctgaaggctcggctattgaagcagagggggacgaggaacagcgtgcggggcggccagcaccgcagtggaaaggcacagcgctgctaacgggtaattattagaattaagaaattaaacgaattagcacagtgtcgggggttcggatgccccttccctgggcatcccttgaaaacccttgaaaagcatcagaaaggtaaattacgaggaaaccaacgtctgggtgggaggtgcctgtggatttgtacggtttttatttggaaggaaaagtgaagatcgcggggaggaattgcagggtgtccgcgacctcccgcgatcctgaggcgagaagttggagtcctggttggcgaagggggatcctttggggtagtcctagaggcaggctagagtcagcgagaccactcacctgtcggcggatgcccggcgaggggcgggaaggggctgtgggaggaaggggtcgcagcctaccacctgcagccctcgactggggcccagaccagtctggccctggccccgcctttcctatctgtgacgatagcagcgcctgagggccactcagcggccgccccggccggctcgccggagctgactggccagttataggagaggcgggagctgtcaggccaggagggaaacccgtcgggcggcggttactatggacgcgctcacgcttagtaaccgaggctccccgccctccgggagacctccttggtttgggaggtgaaaggggtgaagagtagcccaagggagaggcctcggtgatttcccgacctctcctgtgaagcctgattcggaactcttccagctgcgaagaacttggccgattctaaggcacatcagggctgcctggaaccctaacacctgcctaggtgttgacaagcccccacctttcctgaccagcctctcttctctccagcagagcttctcctgtgacagaattatctagtgttccttccctgcttcctcactctaagaaaatggtttgggctttccctctctctcttcagcaaatatttccgtaaacagcagcccgtactgtttcttccaggtgctggcccacatttttacatacatacatcattgctcatccatgcaacctctttccaaacctgtaagaggggtttatattgtacagatgaagaaactgaagttcgagaagttaattgacttagacaatgtgactcagtggcagagctaacactaaaactcaaatcagtcaaacttcaaggcatctttccatgaggcagcagtctaaccgtgtgagcagcaagagaattcaccgagttactttggtaactagtaatgctaaagaaaataaagccctcagttaattatttttggcttttctgggaatcactgtgtggcactccacccaaggacgaggcggagggacttgccaggataaggcaggctgcccagcccctaggagacctcaatgaagtgacttcaagtcgggggctggtcctcagctttgccaattcagactcttggttatgccagtgtcccgagtttattagaggctgactcaggccaaccgaactcatgggaacctaatctagaaaagttagaatgctgcctcaagtgtttacattaagcaacacgacccctctaactgtggagatgagcccagagtattttccccaaagaggaaaaccacagaaaacacccagtgctcagaggctactcatttgcctagacacaagactagacaaggctcccatacccgacaccagggcactgcaaatcctgactagttttcccactatgttccttatcagcaactttttctacattcggcctaagaaacatttcactctgagctgtctttttttattacttttttctcatgcatagtgttctgcattttgtattttcagtattcagcacgggctttgcagatgcctagaatccgtagacaatgcagcaaatgatgccatgtttgttctttgggccaaaagactggcaactgttctaaagtagatctgattgcccacaaactctttaaagatgatgagcagtctttgtgctttgcacacatctagatgcccaatagcattgctaattgaagacaaaattcattcaatgtctgatttaaaaataaacaggtgaaattatagcagaatttgatcttttcaatgatacattgagtcagtgaatttcaaaaacctcctgattaaaatttcaggttaaattgatcaactctgttctccatagaaaggattgaatgatgttttggaaataatttagataccctctcaaaaaaaattgtctcatgattatcaagtctttgccagaattgaggttaatgcttgcccttcagttttacagtacgatagagacctcctacaatgcttattaaaaaaaataaagcaagaccactaggattcagctattcaaccttactttctcagcagctccacaagttcaggaatgtgtctgtttctgttcatctctgtatccccagcatggggcttcctacctgccatgaaagagggactcagtcaatgtttgttaaatgaaagcatgaagtgtgatgtttagtggggtaggaaactatcaaagatacagaagtggagaagcaataaagcagactttgcctattttataactttgccttagtcattttcataacttgaagtcatttttataacttccttagctgctacattttcactctatttagagtcaccaaacctcctctccagtctttctgagccttcctatcactcaaccatcgcccttcatcaagatgctatcagcccctttgagctgtctatccttatcagaaatcaagtgtgggcctagccatcttcacccctggacttccacccccgttcccatcctcacagtgactcacgtccacagcctgctttctccatttctcctccagcactaaagttaatcatcacattcttcctattcccctgacctcaccccatgcctctctccccctcactcactgcgtactagctacactggctttttttgtttgtttgtttgtttgtttgtttttgagatggagtttcactcttgttgcccatgctggagtgcaatggtggtgcgatctctgctcaccgcaaattctgcctcccaggttcaagtgattctcctgtctcagcctctcgagtagctgggattacaggcatgtgccaccatgccccgctaattttgtatttttagtggagacggggtttcaccattttgatcaggctggtctcgtactcccgacctcaggtgatctgcccgtcctggcttcccaaagtgctgggattacaggtgtgagccaccacacccagcctacactggctcttattcaggtttcttgatgctctaagctctttgccacctcagggcctttgcacatgcatttgtgtcattccagtttccagttatttattttgtgtgattatttaattaacatctaagttcccttccagaatatgagtgtcaacaggggaggggagggaaggaagcaggactgttttgctcaccactgaaaactcagcagttcacctgctggtgctgaggagggcagagtactgtgaggaggcccattgcacctctgacagctcctaagggggattaaaacaaaaacacaaaaccaaaaacacctctcccacagctgcgctcacaattcaacagagggattagatgccagactttctagttccaaaccctgatgtggatgatgagaggaaagctcccggctctgtcacagccactccagtgttcccaaaacccaaatgttctgatgggagccccctatacatttatttgatgtccttgctacatgtctggccctttgccaagtgctggaatggaaacaaagtggggtcacaaccccagtggctccacgacagcgctgctgctgagatggggagcaagttcattcagggatgaatcttataattatcctcttccaacctttgctggttcctcagggtttaaaaaaggaggtctcaactcctcagatcagcatccagagctctccatgatctggtcctagcctggcagtgcagccccgtgtccacactccccactccatgatcccaaacatgagtgaacacacaaccctgcctctaacatcctgtgatttttctgatccctgacttgctcatgctgttccctgtacctagcatcttcttcctccttaatattgccccaaatttatagaatctactcatgttttcatgtcaatgtcaaatgctacctccaaaatactgtttgttttgtctgtcaaaattaatttactttccctgtgtatatttgtgtagcatgtacaatccacttgatgttatgcttacttactgatgtttctgactccatagactgagcagtccttgcatctgcacacagacatacacaccccaccattgctctgcactaatacaaatcatagttactatttattaaaccctcactctgtgccatatatcatatattatgctagctttacatacagtatttcatttatggctcctcataccacaatgggataggccattatcatttccgttgtctaaatgaagtggggattccattggagaggttaggtagcttgaccagtgccacacagacaacaagaggaagagctgcgctttcaatccagttctttctggctttcaattctgtgctcctcacctctatactacaagcacaaagtaccaaccatgaagaagtagcttttaatgattatgccatgtcaggaaccactcattccatccatgaactcctccacctctttcaccagccctgagaggcaggtattactgcaccagcacctagtcaacaaatactaatggcttgttgaattactttgtgtgagactgacaacagcagacaaagccagtactgggacagaggtcccctgttaggaggtcctaaagtcaacttttgtagggatgaaaacctttaaaaaggcagtcagaataatgacactctccagagaggagagtgagtggtccacagagtggccacagagcaggtggctggtccaagagagtttaaacaaaccccgcccccaccccaccgcccccccacccccgagtcccgccccgctgccgcccaagattctaggactggagtccttacaggcgatgtttgctgttagcacaaagtccaatggtaccacaagagtactggctgagacagctgaaggtgctcacaactactttgtgagatcctttaaagatctgcaagattataatagggcaatggaaaaacttctgctcattctggatggcagagcaggagacagtgaatgggaagcttgttagacacgcaagtggatgagaaagcaagcaggtagtgccagcacagtctgcttccatcagaagaggggcggcactcggggctgaaatggagtcagcgagttccactcttcagctctgcagcacacaaaaaagaaaattcttactgcattagtttggtgtttccggaagtgtgttccctgaactattcaatcaatcaatcgttaataaaataatagttccatcagcaaatatatttgtgaatttctaacacaaaaaaagttaaatacctttctttaacacaagaatcctccgagtctgtaatgtgccaatttgtattttcccatggaattctaaccacagagtttttaaaactcagaacattttaacatcccccaggacactcatggaacacagtttggggaacctgctttagcataatgcagcaattccaaattttagcattaacgtgccctaaaaatatatttcagtcagaaaaagaaaaatttttgcccatatctagcttatttcagacattctctaaagcaatatagaaataactgacttatctgtgtattcagtatagaaaactccattgtgatttgatgacagtttccctattaagtatcttgtctagaaatgtgtgtgtgtgtgtgtgggtgtgtgtgtgcatgaaggtgattcatggaaaagtaaagaaaaaaagagtaagagaggtgaaagaggtatagttgtcctttggtatccttggggaactggttccaggaccccataaatatcaaattctcagatgctcaaatcccttatataaaaataacatagtatttgcacataacccacatatatcctcccatatagtttaaatcacctctaaattacttataatacctaatacaatgtaaatgccatgtaaatagttgttatactttatttttttatttgtattatgttttattgttggattgttgtctttattttttaaaaatattttctatccacagttggtgaatccaaggatgtggaatctatagatatggagggctgatggtatatggggatgtgagtgaggagtggaaggggagggctgatggtatatggggatgtgagtgaggagtggaggggagggctgatggtatatgggggtgtgagtgaggagtggaaggggagggctgatggtatgtgggggtgtgagtgaggagtggaaggggagggctgatggtatgtgggggtgtgagtgaggagtggaaggggaatgttaggaagtggaaaaagaaaacgctgcctttatagccaaactgtctctaacctgctgatttcttctaaaaccttttaagtccatacttacatttatagctatgtaaacagagaaattggtaatatttgcattgtaggagaggtaacagaaatgtcttccatctcaattttatagtaatatagtttctagacgtgttttttcactgttgttgcaaatcacttagaaaaaagtggtattttactcaaattttcatcatcaatatcaatggtattattttccttgatttctgcactgggaatctgtacttttagaaacagcaatgtcaatctatgaactggatgtgggatctgaatggacttaacgggtagaatatgacattaatatttacataaaagggcttcatggaagattggttaggaacctcagctgggtgtgtaatgcattcattgagaatttttatcacttacaacggcaaggtgataccagttgtcacggctgtgttttgcttatgttactaagctattaaaaggggtgtgtatcactgtcagctttttcaattgaatagactttttcagagcatgaaattgcagggcacgccttgctgggaatgcttccagagagccaagatgtgtaaactcagccaggattattcttatctgaatatctatcccgtgtttagtagatggaagagctatgattcaagaggttaagtgatatgcccaaggtcacagtcacatttttgctcatgatcagtctcctgaccaagtagaaagtggtgggtttccacagtgctctctttagcttctctgagagccattatgttattgttgtatgttttcacagattgccactcctgttagactatgagtcccatgagaataaggacagtgtttttccagccttcatcacaggaaccatttttgaagcacctgctctgtgcaagcctcatatacctcatttatatctctcagactaaccccatgagatttataacagtacttctcttttacagagacttagaggttaggtaacttgaccaaggccacattagctagaaggtgatacagctggaattcaacctaggatgtctgaccccaaagcctgtgatctttcccctacctcaaatggctgtacatttttcctgtgcattctccttgttagtccttagcactgactgaccatcgggctaggcctgtggtgcacttctgctatgtgtttattgaatgaatgcatggatggatgagaatcataacttgggaaacaatgaccagctttcctcctggaacttactggtggtgtggtattgggcaaacccccagatcaactggatctctccataagaagaaaacaataatgcctcactagtccgaagggaagataatgaatcagatgctctatcgaagtcttttccagaaaacagactgaagctgggatgctcgcttgtaaatggttcttggagagcccatcaggcatggaacctatttctataggaactgtctgctcctctttttgtcctgggagaaatgtaactcaagggaaaagaaatcaaggttggagttatcaggtgagatgcattgtgagtaatcaacaacctccccagcagccaagatggctagacaatcaatcagtcttcgtgcctgaagactttcttgtatcatctgggactaccctgaactttaaccttaaagtttcacttataaggtcctggtattattcaccgacagtcctatgtcataaattaatcatcatcaacaacaaaaatgactcatattaagcattatagggagatccttataacctaaagaagcagatagaaacacagatgggatacttagagtggggaaaaatgcttggtttaatgttgttaagagtcattaaatggtaaccattggattatggatagtgttgtgttatagattgtattttgtactatgtatttaaaaaacggggaactataccaaggctacctaaaaagatctgacattttaagatctgagggcatttataatatgctctctatgattctgtagaaaccgagtattataaagaaacattgactactactaacagaaggacacaaactggtctaaggaggctgatatcttatcagaggtacatggtgtttcatccagataagccaataggacctttattagtttagaacaattaccttttgagctcagctactaccactagtaagaagttagaatcttcttaagaggaagacagagcatgtcaaacagaatcagagagtcaacatctctaatttaccatcagtcatgcaatcactgaacaatttgtaactctcagtagcatgcaagacaatgaattatgaaatgtgagtgacagtggtgtactggaactgggtcatactggcttgcaagactattgttaaattttcaagaattttgcaagctcattaagcacagcctttattaaaaactacattatataaatttactgtttagtaaattatattaaaacaatggcaacagatacccaaaatttatcaccttctaattatttcacaatattttattgttttatgtcttgaagtttattttcatctattgtatctttataatggaaacactttatcgtgatgtactactgagcatctcttcccaactctgacatcagcaacattggtagcttgaaaatgactacagtgggagtatttacattatggaaatgatcaatagccacaaagcaaggcttgatttatagttttgttgattgtctaaactcaagaaagtgatggaaagtataatgcacattaaagtatctcctgtttgtagccatgaaattgtgacaggcacacacacacacacacacacaaattgaagctacattctcccactatttgaaaataattatctgattcagcaaagaagtcattcgtgtcattaaagtttccatatacatcttcatttttgtcttgttaatgtgaacggagctgtcaaccaacattcatgttggactcctcttattcattaattgcaactacaggttggttagaaatacaagagtttggcaaaaatcaacaaaataattctgtaaaaaccaactggctatatggaatttataatacagagtatttgtatattttattactatttataaattataagctaagaattgtttaatatcattaaaatataataaacattatgtacagatacatacatttttccccagagattcagctgttaaatgtttgtatcactgtgaatgggcccctgtttctgtccttaagaggttaacatttggtgggacgtgggcaaaaatcctacagtgcaggctctggtgtggtcaaagccatcagaaagaaacccagtctcttcggagctcagaagaggaaaaagcactgccagccaggaaaaactgaaagttttcatttacgggctacagagaaaattgtgtagatctttaaactgacaagagtttgtggaaacaaaagcagagttggatatagatagatgtgctgtatttttataaaatatttgaaatgtcatttctcagtgatttaataagaaagttaatttatttttgttgacattgttggaaatagtttatcttttgtttataaaccagaaacagccagagtctggcgtgtgttaacttgagtctgatttgtgctggtctttgtctaatttacgttcgcttcagtcagccagttatgaggttgccaggctgtggagatgaaggtggcagatagcgggctgagtcttccacaaccttagcgcaagcttccaacacagcttgtcaggctatatagggaagaatctattcagcttagggtgtgcgtgctgactgtgggcccctggggaaggaagcctctctagctatctctttacgaagctatagcagacgctgtccacacttcaacccatgtctcctcggaccctttgatcattttcctgagcacagactccccgtatgcttattcttacatctccttgaagatgaactgtcctcaggctgccagaatctactttgcttaggcaagaaagcctggaagtgcttgggaatttgtgcctcaggccaatccataaccaaagactaatgagttctggggtataaataccccagatgctcttctcctgaggcgtgaccctctgaggcatgacctaccctgtttccagagctcctcctgtgggaatgaaccaaagttaccctcctgggactttgctggataccacattcctgcatctcccaacttcccttctataatagatcctacttccccatttctttcccagtttttcccagtagaacatttcttgataaatcactttcacactaatccttggagtcttcttctggtgaacctgacctaagacagtggccatgttttatgtggtgtgttccccacccccatttattggccatgaatgtttggaccacaggtaaacacccagctcaaaggtggcccctctgtggactggccagtggattgaggtggcatagctcaagtgccaacctaggcagatcctctctctcatggggtttgatattgagtcatatagagagtgactgagtcatcatatttgatattgcaaaactctggctgagattcacgactcgatctgccaagaagcaatgagataactctcactggagccttcttacattctgaaggactttgtcgtttgcaaacatgctcccatttccatggcatttcttaattctatgtgattccttcctataatcctcattactcaaggtaatgggatgtctctggtcctcaaaaagcctaaaatacaagctaggaatcacctcattgagggacctaattttctggccatttattgctgaattatttagggaaagggccctgaaaattatcaaagaggccataatgatttgagtagaagcaacatggagccaaattagcattcatataagttggataatgaagatgagggaatctatttgagatattaaaaagctgaaaggaagcagactagtgttcttacctgaggtagaaaaagcagctgaacctccttttgtcttccatatcttctgtcttcctctcatttgcagcagccaagatggggctatcaagttggggagcagatagtagaaacaatgagggaagagtctatatactaggagtgttggagcccttgagtttacagttgccttttaagtctttcaatgtcttttactcaagaaagcactttagttctagtgatgaaagaatcaggctagaccagaaactgaggcatgctgtttagggcttgttctctatctagattaaaaaggagcttttgacccagcccagatcactaggggcaaaaaagagacaggaattcagggcagatattttgttcagaaatgcaggtcgaacaatctttggggtatcaggccaggtagggtatggagatgagaggtaccaactctacaattctccatattgaaaatggaaggtcaatattttatagccacaagcaaatgcaaacaaatacaattcatgtttgcctggaatcaacatcacctccccctctcccactctgcacttctctgaaatactcataaaaatcctaagtgctcctcaaaagccaataattagctcatcagagtcacactacacagacatatctcctctgctagtacattccctagtgcaggacaagacacatcaaaattgcccagagagcttttaaaatgtagatttcagggtctcatcccaagaggaactgattcagtaagccaaggatgaggtctgcgaacccatacaaactttattacaaatgagcagtttacttggatttgagcaatgatactagatcttaaattttatacagatgatcttactgtatgttaatcttaaggctttttaaaggcaaagaaactatcttctttattgatttcctttgtttgaggtgcatatttttatgcgttcataagctatattataaacagctgccaatttttggctagtgagattttaaaagtagttatttataggtctaatttaactttaaatgttttaaagtctctaagaggaaccttcaaatctctcctgttcctccctcatctgctctatgaagcacacattttctttgagaagaggtttcagataatggaattgaagttagtcaaatcacagaaagtgaaacctagagggattttaatagctccccagttcagccccctcattagatgagaaaattgaggccaaaaagtttaattgatttgcccaaagtcagccaagtgcttgagacaagtatctccaacatcgtttggtctctcccttatacccgggaggcctggtgcgaatattctcattggaattttatttctggtgccattctgcaaacagcactttctggccaaattgagcagatatgagtgcgctatccctgaaatcaccccatctaggcagctccatctcccatctgctacaaaggatctatccgccactgcctatagacttccttaaggaagaaacttcaaaattctaagttaaaaaaaaaaaagcaaatttcatcatgcctcaaaataccgtaatgtttctcacttacctaaatctctggggcctgcttacacatatctgctgagcatatctacctagacattctctttatatatacatacataaaaggtatttatataaatactgtaggtattgatatatacatatatacgcatatacacacacttacatacctacatatctacatgtatatctctacttccctgtaaattatttgtctgagtccaaagtaagagtcataaactccacactgtattggttcttcttatctcatccagcacaaccacctttggattgtcattcaactgaaaaataaacagaaaacacagtgggcactgtgatgctctgtaggcaatcgtgtgcacctctccatgtccagggccaagcagattactcatagctgcccacaagccaagtgccattccccttgcttctacccaacccttcaaagtcaccgatgctctgaggacactaggtgtgtcattgatgtgaattccaaaagggatcatctactgcttagcccctgtagaaatctggtactgcagaggcccagacatgacagtgtctgcccccgtgagacagtgtctgaggttcatgtgcactctgccctctgccatgtgtcagagccccagcttccatgctttgggcaggtgacaagtgggttgacttatggatgccccagttgttcagtagccaggtcatggtcaaccctttgctcccagttttgaacgcttcttcttttctgtataacccaccctgccaactaaatgtttccttttctccatgtgccatggtgtggaaagggctgggaagtgctgcccaggatgtgcatctactaagcattcctgagggccacagttacctgctgtagcagctccccaatcccccatctggggtccccactgcagcgagggagctgtgtgctccagcaggacgagagtggcaggagacgtttttctatctaaggtggctcccatggcacagaggaaagaacacaggctcaggaatgagacagacctgctgcattggtagccttggttttgccccctactcatgcaagacattgaacaaaccattttaacctctctgaggcggttccaagatggccgaataggagcagctccagtctacagctcccagcatgagagacgcagaaaacgggtgatttctgcatttccagctgagctttgaagagagtaatggttctcccagcacggagtttgagatctgagaacggacagactgcttcctcaattgggtccctgacccccgagtagcctaactgggaggcactccccagtgggggcagactgacacctcacacggctgggtacccctctgagacaaaacttccagaggaacgatcagacagcaacatttgctgttctgcagcctccactgctgatacccaggcaaacagggtctggagtgggtctccagcaaactccaacagacctgcagctgagggtcctgactgttagaaggaaaactaacaaacagaagggacatccacaccaaaaccccatgtgtacatcaccatcatgaaagaccaaaggtagataaaaccacaaaatggggaaaaaacagagcagaaaaactgaaaattctaaaaatcagagtgcctctcctcctccaaaggaacacagctcctcaccagcaacagaacaaggctggacagagaatgactttgacgagttgagagaagaaggcttcagatggacaaacttctccgagctaaaggaggaagttcgagccatcgcaaagaagttaaaaaccttgaaaaaagattagacgaatggctaactagaattaccaatgtagagaaggccttaaatgacctgatggagctgaaaaccatggcaggagaactatgtgacgaatgcacaagcttcagtagccaatttggtcagctggaagaaagggtatcagtgattgaagatcaaatgaatgaaatgaagtgagaagagaagtttagagaaaaaagaataaaaagaaatgaacaaagcctccaagaaatatgggactatgtgaaaagaccaaatctacatctgattggtgtacctgaaagtgacgaggagaatggaactaagttggaaaacactctgcaggatattatccaggagaacttccccaacctagcaaggcaggccaacattcaaattcaggaaatacagagaatgccacaaagatactcctcgagaagagcaactccaagacacataattgtcagattcaccaaagttgaaatgaaggaaaaaatgttaagggcagccagagaaaaaggttgggttacccacaaagggaagccaatcagactaacagctgatctctcagcagaaattctacaagccagaagagagtgggggccaatattcaacattcttaaagaaaagaattttcaatccagaatttcatatccagccaaactaagcttcataagtgaaggagaaatcaaatcctttacagacaagcaaatgctgagagattttgtcaccaccaggcctgccctacaagagctcctgaaggaagcactaaacatggaaaggaacaaccggtaccagccactgcaaaaacatgccaaattgtaaagaccattgatgctaggaagaaactgcatcaactaacaagcaaaataaccagctaacatcaaaatgacaggatcaaattcacacataacaatattaaccttaaatgtaagtgggctaaatgctcctattaaaagacacaaactggcatattggataaagagtcaagacccatcagtgtgctgtattcaggagacccatctcacgtgtagagacacacataggctcaaaataaagggatggaggaagatccaccaagcaaaggaaaacaacaaaaggcaggggttgcaatcctagtctctgataaaacagactttaaaccaacaaagatcaaaagagacaaagaaggccattacataacagtaaagggatcaattcaacaagaagagctaactatcctaaatatatatgcatccaatacaagagcacccagattcataaggcaagtcctgagtgacctacaaagagacttagactcccacacaataataatgggagactttaacaccccactgtcaacattaggctgatccatgagacagaaagttaacaagcatatccaggaattgaactcagctctgcaccaagtggacctaatagacatctacagaactctccaccccaaatcaacagaatatacattcttctcagcaccaaatagcacttattccaaaactgaccacatagttggaagtaaagcactcttcagcaaatgtaaaagaacagaaattataacaaactgcctctcagaccacagtgcaatcatagaagaactcagaattaagaaactcactcaaaaccactcaactacatggaaactgaacaacctgctcctgaatgactactgggtacataatgaaatgaaggcagaagtaaagatgctctttgaaaccaacgagaacaaaggcacaacataccagaatctctgggacacatttaaagcagtgtgtagagggaaatttatagcactaaatgcccataagagaaagcaggaaagatctaaaattaacaccctaacatcacaattaaaagaacgagagaagcaagagcaaacacattcaaaagctagcagaaggcaagaaataactaagatcagagcagaactgaaggagatagagacacaaaaaaaaccttcaaaaaatcaatgaatccaggagctggttttttgaaaagatcaacaaaattgatagactgctagcaagactaataaataagaaaagagagaagaatcaaatagacgcaataaaaaatgataaaggggatatcaccaccgatcccacagaaatacaaactaccatcagagagtactataaacacctttacacaaataaactagaaaatctagaagaaatggataaattcctcgacacatacaacctcccacgactaaaccgggaggaagttgaatctctgaatagaccaataacaggctctgaaattgaggcaataattaatagcttaccaaccaaaaaaagtccaggaccagacggattcacagccaaattctaccagaggtacaagaaggagctggtaccattccttctgaaactattccaatcatatagaaaaagagggaatcctccctaactcattttatgaggccagcatcatcctgacaccgaagcctggcagagacgcaacaaaaaaagagaattttagaccagtatccctgatgaacatcgatgcgaaaatcctcaataaaatactggcaaagcgaatccagtagcacatcaaaaagcttatccaccatgatcaagtgggcttcatccctgggatggaaggctggttcaacatagcaaatcaataaatgtaatccagcatataaacagaaccaaagacaaaaaccacgtgattatctcaatagatgcagaaaaggcctttgacaaaattcaacagcccttcatgctaaaaactctcaataaattaggtattgatgggacgtatctcaaaatagtaagagctatttatgacaaacccacagccaatatcatactgaatgggcaaaaactggaagcattccctttgaaaagtggcacaagacagggatgccctctctcaccactcgtattcaacacagtgttggaagttctggccaaggcaatcaggcaggagaaagaaataaagggtattcaattaggaaaagaggaagtcaaattgtccctgtttgcagatgaaatgattgtatatctagaaaaccccatcatatcagcccaaaatttccttaagctgattgataagcaacttcagcaaagtctcaggatacaaaatcaatgtgcaaaaatcacaagcattcttatacaccaataacagacaaacagagagccaaatcatgagtgaactcccattcacaattgcttcaaagagagtaaaatacctaagaatccaacttacaagggatgtgaaggacctcttcaaggagaactacaaaccactgctcaacgaaataaaagaggacacaaacaaatggaagaacattccatgctcatggataggaagaatcaatattgtgaaaatggccatactgcccaaggtaatttatagattcaatgccatccccatcaagctaccaatgactttcttcacagaactggaaaaaactactttaaagtttataaggaacaaaaaaagagcctgcattgccaagtcaatcctaagccaaaagaacaaagctggaggcatcacgctacctgacttcaaactattctacaaggctacagtaaccaaaacagcatggtactggtaccaaaacagagatatagaccaatggaacagaacagagccctcagaaataataccacacatctacaactatctgatctttgacaaacctgacaaaaacaagaaatggggaaagcattccctatttaacaaatgatgctgggaaaactgactagccatatgtagaaagctgaaactggatcccttccttacaccttatacaaaaattaattcaagatggattaaagacttaaatgttagacctaaaaccataaaaaccctagaagaaaacctaggcaataccattcaggacacaggcatgggcaaggacttcatgtctaaaacaccaaaagcaatggcaacaaaagccaaaattgacaaatgggatctaactaaactaaagagcttctgcatagcaaaagaagctaccatcagagtgaacaggcaacctacaaaatgggagaaaatttttgcaatctactcatctgacaaggggctaatatccagaatctgcaaagaactcaaacaaatttacaagaaaaaaacaaacaaccccatcaataagtgggcaaaggatatgaacagatgcttctcaaaagaaaacatttatgcagccaaaagacacatgaaaaaatgctcatcatcactggccatcagagaagtgcaaatcaaaagcacagtgagataccatctcacaccagttagaatggcgatcattaaaaagtcaggaaacaacaggtgctggagaggatgtggagaaataggaacacttttacactgttggtgggactgtaaactagttcaaccattgtggaagacagtgtggtgattcctcagggatctagaactagaaataccatttgacccagcaatcccattactgggtatatacccaaaggattataaatcatgctgctataaagacacatgcacacatatgtttattgcggcactattcacaatagcaaagacttggaaccaacccaaatgtccaacaatgatagactggattaagaaaatgtggcacatatacaccgtggaatactatgcagccataaaaaatgatgagttcatgtcctttgtagggacatggatgaagctggaaaccatcatcctcagcaaactatcacaaggacgaaaaaaccaaacaccacatgttctcactcataggtgggaattaaacaatgagaacacttggacacaggaagtggaacatcacacaccggggcctgttgtggggtggggggaggggggagtgatagcattaggagatatacctaaagtaaattttgagttaatgggtgcagcacaccaacatggcacatgtatagatatgtaacaaacctgcatgttgtgcacatgtaccctaggacttaaagtataatatatatatatatatatatatatatatatatatatatatatatatacatacatatacataaaaagaaaaaatctataaagaaggcagaaaaatagaatgtttagaagaaaaagttaaataatgagcaatattcttatcaataaaaatagttggcagaaaaccactgaagtgctgttaacataaaagtttatacctaaattatcactcaaaataaaggcaaaaataaatacaaaaaaaaaaacctctgagactcagtttccttatccataaaattgtgatactgataccaacatcacaagttgctatgcaaatgaaataagaagacaggcgaaataatctctctcttcctctaggtaaagcatattgttgttcccatggaaaaaaagaataactggggtggggagggggatgtttgtgaacctacacagccacatacagcaactattttctactggtctcctcctcccacggcagtgtggcgggaaggagaggctgtgtcatctcgctgctgaaccatggcaagacagaacttaattatacgtggctgcagtgtagccgcaacattggatgagctcatcggttcttacagaaaatgacccagggattcttgaaaggtgacaactatttttaaatacctagacttttaaaaataaaacactttcctctctcttctctcggcttaaggcagattggcccaaggtctaatttacatctgggtctattgtgagtcacatagctgatctttcttcccccagttctatattcttaaagtttgtatgcacttccaagcatacagcttataaatagtaatagaaacataccacttgattcctgacatatatacccaggaggtttcatttatccactactataccctttatccagagtccccaagaaaagactgcaaaggtcagaggcacgatgagcctgccttgactttgagggtggttgttagaaactgcagggcagtgagaagaaaggggagcagtctcagctaggtctgggacatcatctgagacacagtgcaggtcccttctccagcccagtggagactactaagctataggacaaggccattggaggtactggaacaccttccaagggacctatgggcactgggaaggttcgggagcaacagttttgcttcagtacatatccattcctacatctaatctgcctcaggagaagcagagtcaggagtctccctggttctctgtccctgtcacaaaagctctacttcccacttatggtcacaagttgccctcaggtgtaaaacattcctgggtgacaaacaaagggacaattcaaaaacttagtgatgggttcagaaagtatatcactctcatgactagttacgaattcttttgccagtgaagtggtttctactttgttttctacaaaatagaaggaagacctagacagttgtcctttcatgaaataatttttgacaatagatgatcttgttatttggggcataaaactcagaaggagttatattttaaattgagtagcattgacataataatactgctttctgtctactgatctgtttgaatgcagtttcaaagcaccaacatctacaaaagtaaggcattggggtggaattgatactgaaacacagctcagtttagcaacagtagtttagagatatatgttacaacactttgataagtaaattcatgaatgtctcatccatcttattgagaggcatgtaaataatacaattttgccttcggaatttattaataaaataaatttatgttttttagatcagaatatactgaacatgaaaaatattaaattgttgcacttagacccttacttaaagtcctattaaagactcctgtttaaaattctttttttagaattaaatgtttttgaatttttttatatacatatttttgtagcagagaattatgataggttgttcaatggcagattttcaagcctaaatatatatttcattaagatgaaattctgtggtggaagtagaataagaaagtaaattcaaagaatgatgtaaaactttgactactaagaaaagctgggttatttatttatttatttatttattttgagacggagtctcgctgtcgcccaggctggagtgcagtggcgccatctcggttcactgcaagctccgcccccctggttcacgccattctcctgcctcagcctcctgagtagctgggactacaggcgcccgccaccatgcccggctaattttgtgtatttttagtagagatggggtttcaccgtgttagccaggatggtctcaatctattgacctcgtgagcagcccgccttggcctcccaaagtgctgggattacaggaggtcctttatttttaattggatggtggtaggtatcattcactatgctatgtagctgaatacattgaaaagaataatgtaacagctttacttttaaataccaatatttccagaacatagaaaatgattcctctgtaacgacttaaacttacaaaaaaatgtttacatgtcaactctaagaactgaaagcatagttaggaagaatgaataagacctagtatttgatggcacagtagggggactacaatcaataataatttaattatatatttaaaactaactaaaagagagtaattggattgtttgtaacacaaaggataaatgcttaaggagatctgtaccaaaatatctcatgtgccccataaatgtatgcacttactatgtatccacagaaatttaaacaatgtaaacaaatttttaaaagtaaaagagaatgtgaagctttgcaaaattcttaagttgacaagagcccaaaactttgaagactgcagttctcacgtacccagataatggtgacctggctcttcctgtccctgctgctcctgttcctgcctcccaaggaacttgggttcacatcctagctttctaccttgaggcaactgattaccattctgtgacttgatggcagcccaggaatatcctattcatgaagaagacacattttcacattatactaattggtcaatatctttccacaaaaggtagaaataatatgtgtggttgcgaggctgcttttcaaggcataactttgagataagataggtgacaaaaatgtcgtgcaggtcttagataaaacaagggtagttcctaggaaacatgagctccatctggggtagcagaaaagattactcagggccgggcacagtggttcatgcctgtaatcccagcactttgggaggccaaggtgagtggatcacgaggtcaggagttcgagaccagcctggccaatatggtgaaaccccgtctctactaaaaatacaaaaattagctgggcatggtggtgtgcgcttgtaatcccagctgcttgggaggctgaggcaggagaatcagttgaacccaggaggcagagcttgcaatgagccaagatcacgccactgcactccagcctgggtgagagagcaagactctgtctcaaaaaaaaaaaaaaaaaagattactcaggggcagggagaaggtaggtggcacccacctgtgcttgggtgggaactagagcagagagagaagagacagaggtgttcacaacgcctatgtgtccctcctccacccacactcaggggctccagcacctgcagagaagcctgccctctccccagtgtcaccatgggtcaggactcccttttgacctgtaaggacaactgcatgtccatcaccataagatccttgtccaacttgaagggaaacaaacatgggtccaggacaaaacttcatgcctgaaactgggcaggagtatgccacaaagttgtaaacccctgccaaaaagtggatattagagcgaatgcaaccggctggcagcagacccatcccaatgttgagaaaggagctggaagtatcaggcaggagtccctgagcctcgtgaggtcagggaggggccttcatttaccaaaataggccaccaaaagcagaagctggagatgctggaggaaaactttgtcagctggattgctgaggcctggccctctgtgttctcaactgggttgaagaaagtagaaattgtacagactggtggcttaggtcatgcactgagtcacaagtatactatattatgaaatatttgctcttcttacacagcacatgggcatacatacctgttcatagtccacacatggattctgaagaatttcactttcatgtagctgccttcatgattagaaaactttgttcacaagtaacttagtaatcaaagcatcagaaaatttagaaataatgatattaatacaaataatagtacagatattccctgactgtggtagataccccttgggatacctgcgtaggccctgattatttttatttatttatttattttttttttgagacagagtctcacactgtctcccaggctggagtgcagtggcacaatctcggctcactgcaacctccgccttccaggttcaagcaattcttccgcctcaacctcctgagaacaggcacccaccaccacgcccagctaattgtttttcttttttttcttttttttttttttgtatttttagtagagacagagtttcactatgttggccaggctcatctcgaatgcctgaccttgtgatccaccagcctcggcctcccaaagtgctgggatgacaggcatgagccactgcgcccagcctaggtcctgatttttaaagcaactcccctgttctgccttcaataatggaaccatgcccagccccatggccacattctttctacttaaagtgtggttcatggaccagcagcaatggggtcacctaagagctcataagaactgcagaacttgagattctgccttgatgacagatctaaatactcagaattttttttttttttttttttgagacggagtctcgctctgtcgcccaggctggagtgcagtggcgagatcttggctcactgcaagctccgcatcccgggttcacatcattctcctccctcagcctcccaagtagctgggactacaggcacctgccaccacgcccagcttttttgcatttttatagaggcgggatttcaccgtggtctcgatctcctaacctcgtgatccacccgccttggcctcccaaagtgctgggtttacaagcgtcagccaccgcgccaggccaatgctcagaattctaacaataccagtaggtgagttgcatgcacattaaggtttgagaagcacttgacaacatggcatcactgttctagatttagctcattagattcagggtgagcgggacttgaagaaaattgtgccaaccacagtcttcattgagaatcttaactaagaaacaataacggcaagggaaatgagatcacattcgtggcacacctccagagggaaggtttgaaaagttctgctaggccctcagttgccatacttgctgggatgtcttacaataatatgcttatttggacaaacattctgtttcaaatgacagaatgtttggagcagcttggatttttggtaaatcataaatgtgttagagtatctgtgtgcacaaacacatataacacgtaaaatctgtgtgtgtgtgtcacaagaaaagaagactacagatcagtgtctttcatgaatatagatgcaacaatcctcaatatggtactagcaaaccaaacccaacagtatactgaaaggattatacaccatgattacgagggattcctcccaggaattcaagggtggttcaacatttttttaaaagacaatagagataattcattgcattagtaaaatgaaaggaaaaaatccacatgatcatttgaattgatgcttaaaaaacatttgacaaaatacaatacattttcttggtaaaaacgctcagaacactagaaataaagggtaacttcccaataggataaaggatatttgtggaaagcccattgctagcatcatattcaacggtgaaagactgaaagctttcctcctaagatcaggaaaaagacaagaatgcctactttcaccattgatgctcaactctgtactggaagtcctggccacagcaattaggcaagaaaaagagataaaaggcagccaagtaaaaaggaagtaacaaaactatttctattcacaggtaacatgatcctatatatatagaaaatctcaggtccctgtatgtaggatccaaagaaaacctattggagcaaataaatcaattctgcaaaattgcatgtgtgatcaacactcaaaaacccattatgcttctatataccagcaatgaacaatctgaaagaaaattaagagaacaattccatttatgatagcatccaaaagaataaaatacccaggaataatttaactgagaatgtgaaaaacctgtacaccaaagactacaggttcctttttttttttttttttttttttgagacggagtctcactctgtcgctcaggctggagtgcagtggcaccatctcagctcactgcaatctccacctcctgggttctagcaattctcctggctcagccccccaagtagctgggactacaggcgcatgctgccacacccggttaattttttgtattttagtagagacggggtttcgccatgttgcccacgctggtctcgaactcctgagctcaggcattccacccgccttggcctcccaaactgctaagattataggcatgagccactgcgcccggcctacagtttccttcttacacagggctccaagtggcaacaccaatctacagggactaacatgacctaggaaatatcagaggctcagagtttgcatatattgaggcagagggcactttgcctgcttttctgctcaagtgtgtttgcttggctacaaataatatttaagaacatgtttttgaattaaatattaactaactttttgtttgtttgttttgagatggagtctcactctgtcacccaggctggagtgcagtggcgcaatcttggctcactgcaacctccgctacccgggttcaagcagttctcctgcctcagcctcccaagtagctgagattacaagggcttgccaccatacctggctagttttttgtattttttagtaaagatgggttttcaccatgttggctaggctggtctcgaactcctgacctcaggtgatccgctctcctcggcctcccaaagtgctgggattacaggcgtgagccacacgcccagccaatattagctaatattaatgagtaatatatttagtacagttgcctcagtgtcggctagcttcattggcgggggggctctggatgccacagaatagtcatttcaggacttcaaggaagatgataatgagaacattttgataattagaacattttttctcaacttagttctatctcacaatagcagcacacataggcaaccctctatttagtgtcaatgattattcacacaatagaaagaataatagacttttagatctggaaaggaggccaagtggctttatttttattaatgttttatcctggcatgactattttgttccccaggaagtgaaaagtatacatgcttgcacttttattttctgggaaagattaatcgctgacctcttcctcttgttccacaaagcaaagaatattagaaatcaaaggaaactaaaaatcatccagttcaatcccatttctttccaaatgaggaaacccaagtaaagcttagagacgttcaacaagttgcttaaaaccacacaattggaagaatctagacccgaacccaggtactctgactccagggtggaacattcccagcccaatctaatgtggctttcgtggagcacgcgtgagcttcacttgttggtatcaagactgtgtgggagttcatcatcttcacacctggggatggacatctaggctttgctctgaactttcagatttatcaatgtgtggacaagcttcttgaagaaatcctccacaaaaagaggtcccaatgcaaactagatgcagatctagctggaaatgacaggaggatgaagtgtcggctcactttgaaataaacttcagggtaataaggaaataccaggtgacctcagacttgaaccacacaaaacacaacactgagtagagtaaactgtgtttaaagagcacttagagggtgccttgtcttgaataacctggctatgtgactttttaattctttttaaatttaaacttagcacatgtctgtatcctccttgtagcaagtcaagtgacacatcagctcgtggaagaaaatctaacaactttctcattactccccctcctttctcacccccttcctcaaaggtgagcaccattaacagtctgttttctctttctgtcattctaatggacttttaaaatgatattctggccaggcacggtcagaggccgaggcaggtggatcacgaggtcaggagatcgagaccatcctggctaatgcagtgaagccccgtctctactaaaaatacaaaaaattagctgggcgtggtggcaggtgcctgtagtcccagctactctggaggctgagacacgagaatggtgtgaactcaggaagtggagcttgcagtgagccgagatcgtgccactgcactccagcctgggcgacagagcaagactctacctcaaaaagaaatgtgcatagtacaaaatccaaaatgtagctgtctccctgcccactatccacccagtttgaatggagaaggcaattttttttatcagttcttttaagtctttccagagatagcctgataagtatttatttatttacatatttcacacaattattagtgttctctacatactactccgaatctttctttattctcacacagactgatagtcttttcccattgaagtgtataaagcagcctcattctttttattggtgtcataatttatttaacctgccatgttgaaagatatttagattgttttcaaactttaaaattacgttacaaatctacgtaaacatttgtagagtaagtttctggaagtagaatttctgtatcacgggagtgtgcattcataatgttgatatctattctgtttcccccctaaagacactgtttcagtttgatttccctctaggatttcctggtcctgcctgcacctgccgctccctccaaatttgttaacaatataattgggattgaattaaatgtatgtttccccacccgtgaccaacattatgtgtcattcaacttttggaattttggcaatatgataggtagttgcatttattattctcttataattaatgagcttgagtatattaaagcctatttctattttcttttatcaattgtctgttcatatcctttgtctgcttttctgctgagttgctggtcttttgttgttgtttgtttgtttgtcattctttataccagcgtttcccacccagtgagccacagagttgcaaatgggtactgacctctggccccagggtgaccagtgggactgagccagcctgagaagcccatattctgtgtgtgccacaatctggaaacatttagccccaagtctgtgcactgaaccaatatgcatgcatcctcttaggtgtgagggtggatttaatatattttatcatctgcagtggtcctcaacctttttggcatgagggaccagtttcctggaagacaatttttccacgaatggggagtgggggggatgtgatgctttgggaatggaagtgttccaactcagatcatcagcattatattctcatcaggagcatgcaacccagatcccttgcatgcaaggttcccaatagggttcgccctcctttgggaatctaatggcgctgctgatctcaggtggtaatgctcgctcgcccaccactcacctcctgctctgaggcctggttcctaacaggctgcagaccggtacccccacaaccaggggttggggtcccccgatagagtaagtattcaccaattcccattttcctaagagttttcagcaagattacatattgaatatttcaaatgtctttttagcatacacatttgatttttaacttttatttggttaataaggtgaaatacattaataaatattcttatcttgaattatcttttacatgtttataaaaagtttaaaaataaaattcttttatttattttttttttttttacactcttgttgcccaggctggagtgcaatggcatgatctcggctcactgcaaccaccgcctcccaggttcaagcaattctgcctcagcctcccaagtagctggcattacaggcatgcaccaccttgccgggctaattttgtatttttagtagagatggggtttcaccatgttggtcaggctggtctcgaacccctgacctcaagtcatctgcctgcctcagcctcccagagtgctgggattacaggcatgagctactgcgcccggcccaaaaataaaattataagaaaagatttataataatgaaaagcagttcctttacccatctcttttcacctcccagttctacctgttaattaatgggccaattttgtgtgatttgttgatgtcctgcaatagtaactgatgatatttgcatcttacatcttcaggaccactctcccatccatgaattcttactgtagaattttattaccaagaaatttattatacattaatcgatgtttacatgatttcaattaagcaaatattgttcactgcaaagccaagtagtagttttaatatattaaaatatttaaacttgcatatttttacttgcttattttttcttcacataatttccttatatgactctgttccattttgttcacatctgctgcacgcctgcgagccatgtgttccatatgctcaatgtatcggatcatctgtgaattccatttttgtccccccaagttctcaagactggctgctcattaggactctacacagattacatccagggatttccatttgcctttttttttttttctctattaaataccctgtttcttggctcccttgccttcttaatgtttgttgtttttctcccattttagtggaataaatccttatagcagcctatgcaaaggtttgtggtcagtaaaatttgcgatttcctgtagaatcatccattgcttaacgacagggataggttctgagaaatgtgtcgctgggtgatttcgtccttgtgagaacatctcagagtgacatacacaaacctagatggtacagcctgctacacccctgggctatatggtctagtctattgctcccaggccacaaacctgtatagcaggtgatcatactgaatactgcaggcaattgtcacacaatggtaagcatttttgtatctaaacatatctaaaaacagaaactgtacggtaaaaattggtataaaagatttcaaatggtatacctgtacagggcacttactatgaatggagcctacaggactggaaattgctctgggtaagttgatgagtgagtggtgggtcaacgtgaagccctagaacattggtgtacatgactgcagactttataaacactctacacttcggctacactaaattcattcaaacaatttttttcttcaataataaattaaccggccgggtgcggtggctcacgcctgtaatcccagcattttgggaggccgaggcgggcagatcacgaggtcaggagatcgagaccatcctggctaatacagtgaaaccctgtctctactaaaaaatacaaaaaaattagctgggcgtggtggcgggcgcctgttgtcccagctactcaggaggctgaggcaggagaacagcgtgaacccaggaggcagagcttgcagtgagctgagatcgcgccactgcactccagcctgggcgacaagagcgagagactccgtctcaaaaataagtaaataaataaaataataataataaattaaccttagcttactgttaatttttttttttactttatacgcttcactgtttttaaactttttataacaacactaaaaacacaaacacattgtacagctatataaaaatattcttggccaggtgtggtggctcgcacctgcaatcccagtactttgggaggccgaggtgggtggatcacctgaggttgggagttcgagaccagcttgaccaacaaggagaaaccccatctctactaaaaatacaaaattagccaggcatggtggtgcatgcctgtaatcccagctactcgggaggctgaggcagaggaatcacttgaacgtgggaggcgaaggttgcagtgagccgagattgcaccattgcactccagcctgggcaacaagagcaaaactctgcctcaaaaaaaaaaaaaaattctctatctttatatccttattttataagctattttccatttttaattttttactttttaaacttgtttgtaaaaactaagatacaaacacacacattagcctaggcctacacagggtcaggatcatcaatatcattgttctccatatccatgtcttatcccactagaaggtcctcaggggcactaacacacagggagctgtcatctcctatgataacaatgtcttcttctggaacacttcctgcaggacctgcctgaagctcttttggaggaagtgtcactcttttcataaatatgttcatagtgatttgcctggtttacttttttatcataggtttgcatgagtaatatgttgtgctatgacattacaaagactatgatgccattaggtaatacgaacttttcacctcgattataatcctatgggacctctgttatatgcaggttcattgttgactggaatgtgtttatgtggcaaataattgtatatctaaaaatgtcattattcttcacttatacacttgattagctatttgtctcattattaaattctagtttgaaaatatttttccttctgccttccaaggttgtgtgaaaccacactgattcctaattctttctttatgagacccggtttccctctttcatctttcagtgtcttttcttaattcctattgttctgaaatttcataaaagatagacttgtcatgagcttgttgttgttgtttttatttgttcattttgtttgttttacttgtaatagtttttgatccttgcttatctcttattacctggactgtcatgtccttcagttctagaaagtcttcttgtaccatgtctcagataatttcctcctcttcatttcctctggatctcctattagatgaattttgttttttttaaatagatcctttaggccaggcacagtggctcacgcctgtaatcccaacactttgggaggctgaggagggtggatcacctgaggtcaggagttcaagaccagcctggccaacatggtgacaacccatctctactaaaattacaaaaattagccaggtgtggtggtgcatgtctgtaatctcagctacttggaggctgaggcaggagaatcacttgaacccgggaggcggaggttgcagtgagccgagattgcatcactgcactccagcctgggagacagagtgagactctatttcaaaaaaaaaaaaaaaaagaaaacatatatatacacacacacacacacacacatacatatacatatataaatgttcttattgtttctctacgattttccatatctttgcatgacatctttacattttggaagattttctcaattgtatttcccagtcttcctctaatgtttattctgctgtgctacttcaaatttccaagagcttttattgttgtctgattttttttttctgagaatgaggttcttattgtatgaatgcaatgtcacctctcacctctttggagacatcagtgctacagtatttttgaaggtttctcgtctgccctgcataatttcttacctggtttcttatgtttgttttggacccttcccccaaatgtctgatgaaagttgactgcccatgtatgtttcagagtcttaggggcactaagaagatgactgcaggctcaaagtacacagccaagacttgtcaagcagcagctgccacacttgggcacctccaggtttcaatgaatggagctattttctctgggtcagaattttccaaatcacgtccttgtgtgtggctgggggcatactgtgagcagagccagggaagagagcagaaggatgcagagcttcatttcatacccattttcatccctgtaccacaccacctcattgtgcctaaaatgttcaagaccagaactccttctatctaatctgtctgtaatataaacctgcaactttatacatggagcagaggtcaggctagatcaatctggagacccccaactctggatgaagtctgtgctcctgtagcctttttgcagcccccagcttgcctcccactttctgtgggacctgatgctttcaagaccagactctccaaagagttttatggactctatgaatgaagtcacctgttttcttccagtatcccctactcaactaattttagaatgcagtttttgcctctttgctaagtcagttcttctctcccacctgttttccatattccagaaattggtttaaatctctcacacactggtggctcctgtcttgtcttctgagccctcctgggaggactcagaaccttttgtgtttctataacgttacgttagagtggtcttgggtggagagtggggaaaagaaaaaatgatacacatagatatttgatctgccatgttttaacaggtgttttcttttccttctgctcttgtccagtttcaaagttatgcctgtggtatgaattgagaacgtttgcattttttctatgctctgggagagttaatatcacatagtctctggtagaatgtgtccagaaaaggatccaggccttctatctttttaagggttagatttttgactgccttttcaatttttctgtggttattgttttatttaagttttctacctctccccagaccatctcaaattttggtatttggagctcctgaatctatacatatcttactttttattttattctttcaatggtttgttctatagcataaaaatcagggaatggcatcaatagtcacaaggtagaaacaacccaagtatccactgacagacgaatggataaacaaggtgtggtatttcagacaaggcaatattattcagccttagaaagaaaggaaattctgacacatgctacaatatggctgaaccttgagagcataatgcagagtgaaataagccagccacaaaaggacaaatgctgaatgattccacttacataagagacctagaatagttaaattcatagagatagaaagtagaatggtggttgccagaggctgggttgagttgcggtgggaggttttttaacgggtacagagtctgggatttgcaagataggaagagttctctggatggatggtggtgatggtcacacaacaatatgaatgtacttaatgcccctgaactgtacacttaaaaataattaagatggtaatgtattttacaacaaattaaacttgtttaattttaaatttaagaaaaaattaggaagactttcttggcttggacgtttagcccactgatttagttttcacatttggttatttgctcactatgctgaagttttttaaaagtcacttattttaaatttgtaaagtttctacttgattcttgttttataccaactattcttattttgtggcgattccccccaagtaacctatcataagatgttaataatctttaaagtatttggtcattttcactatttccttagaagataatttccttctctgccttattaagcttagtgttttgtgttttttttttgtttgtttttgtttttcgagatggagtttcgctcttgttgcccaggctggagttcaatggtgcgatctcggctcaccgcaacctccgcctcctggattcaagtgattctccttcctcagcctcctgagtagctgggattacaggcatgcatcaccatgcccagctaattttgtatttttagtagagacggggtttctccatgttggtcagcctggtctcgaacggctgacctcaggtgatgtgcccacctcggcctcccaaagtgctggtattacaggtgtgagccaccgcgccgagccagcttagtggttttgtttcatgtgtttgtttttctggagtgtctgatgatttttgctcttctctttgtattgagaatttcctccttgcctgtctgtggacacagtttatcgtctgtgtctcttgttcttggtgaatgtgcggaggcgtttaatgtgtgtggacaggtctctatccctctttagctgcagtagtaggctccagggtacctccttctttctgagccccagttgcccaccacactatctgcagtcatggcttcttgctgcatagcagaagttgagattgagggaaggggctgccttgcctgcctggccttccaactaattgccctgaagaaagccccaggaccccgcctgtgcccttgtttctacctagactctgggtctggggcttccttgccccaccacatctgcatagcagcctttttctgggatgccctctggtttacatcttctgctcttctggtttgcccccaccttggagaactgactaatatggtactcatcttatttcttggtgctgtcacgaacttaatatttcaagtcatttttatctgggtgttcagtccacccccttgtggtgcccttcgttagtcttcataatgacttcttgaaagctctctgagtcaggccaggttgcttctgagctccacagcaagctggtagaactcatacttatgaatagtgctgaatagttctccacacttgagtcattcacaactacaagggcccaaacagacaaaaaggatccttataacgcgtggaaggtgcttttctccatgagctgctggataaatgaagcctgtcatttcttgcatactgcagcttctcaagcactttcctgggactccaaggagaccaacgtgttctggcgccgtgagaggaaacactggcagttttgataccagtgccataaagaatcaatgcacagccatggagtacagagagacataaggcatccttttgttcagctgcaaatactgcattccaggagagccagttctgagcagggggcagagggagtagccacaaaatggcctttgtccgaactcccataaaaaaattccagccagtgggagtgaacacagacacagtccagacagtcgattgtagatgtcctggattttggcttttacagtgaaactattccaggaattcatggaccgtggtctattgaaggaggaggaaagcaaatacctcctcaaaaaaaggtgccacttgcaaaaaaagttgatttttatggttgaggatttattgcttactaagaacttggtatctagaaaattgggtgagtttttattagtggtgtatagatacagccaaagaaaagcacttcccccctttatctcaccctcacgcctatccttagttctctcatacacacacagacatgtgaattcagctaaataatcttaaaactgtgttacatctttggaattacagatacacttgtaaaacttgttcactaggtaggtattattattcctattttagaactgggaaaaatgaaagatccaagagtttaagtacctggatgaaggtcagctggcagagctgcaattctaacccggatctgtctacctgcactacctgcattccagatctaccacacaggagcctcattgctaaaaggaaatactagcttagtggtgggactgcccaggtccgaatcttgccgcatttgcccaaaagctatgagataagtacatctctgtactttgcctttcccagctttatgatagacatgatggtcatgcctccatcatcattggagcatagaactctggaagcatttaatgatgtaagatgtggcgtagaacaaacagtacctagtacttgctgaacagcaaatggacctacttcaattgtgtcaagggccacagaggaaaagcctacccaggatcagtaggatgagctttgaaagacttttccggcttggaagcatttgcagtgatgcattcattttgagtcactttagattagttacatacaatcagaaggtggctggtcagatgaatgctactcaggcattaactgagctcagataccatcttaagtgctgaccaccgctaggcagagtggcgaatatggacagagaacaccctggtcttgctttcctttcttctaagaagataagatttgtttcatagactctagggagagagtgtgctaggaagcaccgtgagcaaaagtcgtaggatctaggcctgaggccatctcagtcactaaatgggggtcttaatttcttcatttgtatagatggggaagggaaatgaattcacattggaattttcttacaaatctagaaatacgtaattctgcagttcagtttctttgcaaaaaaatgaacctcatttgtctcaaggccagtctccaaccaaccaccatacaacttagaaaattcaatctttgaatgatgaatggcatctcaaattgaattgaaaaaactttaagatgtcagaccagaaacagcaagaacaaacttttgcaaaataataacagattacagtaagacacagctgagttcttaggtggtgaattcactttcttgcctagtacagaatttttttttaagaatttcacctctggccgggcacagtggctcacgcctgtaatcccagcactttggaaggccaaggcgggcggatcacaacgtcagaacatcaagaccatcctggctaacacagtgaaaccccgtctctactaaaaatacaaaaaaaaaaaaattagccgggtgtggtggcgggcgcctgtagtcccagctactcaggaggttgaggcaggagaatggcgtgaacccgggaggcagagcttgcagtgagctgagatcatgccactgcactccagcctgggtgacagagggagactccatctcaaaaaaaaaaaaaaaaaagattttcacctttaatgattcatttccagtgacttgggcacatcatttaatttttatgaagcatgaactttttgttagtagaagggtaggagcagggcgtgggtttaatgcttacattaggaatcacctctctgttccatcccaatccacctgaattactcagaatgttgtcgttgtcaccatcatagtagacgtcatctgttggtcactgtgtctcaggtgcctaaaatatccttatgtaattctgcaaaggagaagtttttgtttttgtttttgttttgttttgttttgagacacagtttcactcttgttgcccaggctggagtgcaatggcgcaacctcggctcactgcaaactccacctcctggattcaagcaattctcctgcctcagcctgctgagtagctgggattacaggcacgcatcaccacacccagctaattttttgtatttttgtagtagagactgggtttcatcatgttggccaggctggtctcaaactcctgaccccaggtgatccacccgccttggcctcccaaagtgctgggattacaggtgtgagccaccacgctgggccaggagaaggtttaaaggtagttccaactgaggagtaactctcccattctgttttagagttttcatcgtaatgaaacattttgatactgttgaagttcagttatttttacaaatattaatatattgataatcaataataaatacagttagttcttgtcatcttgacatttttgccaagcaataagtacaaagccttgtttcatatatgttttcttttaaagacacctagtttatacatgttgtggattcattaacactgacttcatgtctaactgcactatcactcatgcccagacaaagcttatctaacacaagcattttctccataaggcacatcgcacccttcttgcacttaggaacactagacggcatttcagcactacgcttggaggccattaaaaacaataaatcaccaacgataagcacaaaaaaagttaaaatattgtactaaaatacctaaaatacttcacaaaggacactcatttacagtattgagagccaaaacaggaaagcaaagactttgtttacatctcagacactgacatttttttgccactttgttgcatatgtgtgtctgtgaagccgaacaaagggcatgagtatgaatctttttttttttttgagactgagtctcgttctgtctcccagcctggagtgcagtggtgcgatctcagctcactgcaagctctgtctcccaggttcacgccattctcctgcctcagcctcccgagtagctgggactacaagcatgcgccaccacgcctggctaatttttttttttttttttgtatttttagtagagatggggtttcaccacgtttaccaggatggtctcgatctcctgatctcgtgatctgcctgcctcggcctcccaaagtgccgggattacaggcatgagccaccgtgccctgcctgaatcttgaggtgacaaatacattttagtgaccagaccaactcacaaatacagaatccgcaaataatgaggattgattgtagtttgaaagctatggtcttgaataaggaaacagaataatacacacgttgagagcaagagttttagagggagactacctgtgctcgaatcctggcttgaccacatactaagtggccaaattcttcttcatgtattggctttatttcctatgaaactggacaataaaagtactcactacataggattggcatgaggactaaaagagttaaaatatataaagttctcagaactgtgcctagcatggaataaatgcccataaatatcagctggttttcttcacctccctcccctgccctgcctttcttgagggagatagagaaagaaaaccccaaactgagaagaccccattctgcgtttccatacttgaaaaagcagaagcaattcccccattttccatctaacaaagaaaaaaatcaaataaagcattagaatattcagttggataataaatatgcgtacttgtgagtttctagaagtttctgagactatttccccattcacttctgtaataacttatttccactgaacttccatatatcatttgctttttatgaagcttgatactctgctcactggaagagtaggaaatgggaacgaggctgatgtttacacaatgtgtggccatacctttttggcccagagctcaaagatatgattcactgtgtcatacatagctgtttaatccccagagaagtcttcaagaatgcacctgccttatagtctggaccatgtagcagaagaaccaccatcagatgacacctcatccacatcacaattccattttcttagagaataaataaactccttttcataagattgaatttgcaaactgatgtgtatggctagagagtagctgagaatcaagagataagaaaacgtacaaataacatcattaacagtaatttcaaggatttattactaagaattaataatattcactttaagtttactttcatctagtaaacaagattcttgaaggtatcaaaagaaagaagatttctgcttagagttggtgtttggaaaaataataataataatgaactttatttttcccaccatcccttattaacattagagctggccctgtccctctttccaaggatgattgaggtgaccaaagaaggacgagagcaagacagtttgcaggagatggcacaaggcttataagggaagttgctttcagcccaggaatgggaaaagatagccacatacattcacagcttgcatcttcatttgaaattacagcatcagatcacctaggaaatagtagcacagggatagcaaatacatcagttcaccatatcagctcgcgttcattggtggtgatctctggagccctgttgggaagggttctgcaaccgagatctgtgggacacagtgccaaaacataaattggtaaattatgactccacctgggtgctgtggtgctttttatgctgtgatgctccacctgatgctttttatgcgtccgctcattgcttcctcacaatgggcatgattaagattgccattttattgaagaaacatgcacaagatcacattgattaacaaagctaattgctaatacatgtccttggatattgtcaaggtgttttttggtcagaaccccctggctgggagccaatacatttgaatatagtagctccttgttataccacttgatagccatgggaccttgggcacttttctttaacccttctatacctccacttcacttaatagaggtgataaatagttccctattgcagggttgctgtgactacgatagtgttgtggaaagtcttagcatagtgcatggcagacagtaagtgcccaataaaaatgtcagtttttattattgccattattagctttccagggtgcactgagagtcactaatgctgcatttctggccccacccaagcagttagcatccaaagtcccttgatgggaacatattgcagactcagccaaaagggatgtagctcactcttggtggataaacttttatcagactaagtaaaactgcacctcaggcccagatcatatgtctttatggaaaaatcatcaaactataccaaacggtgcaaaactcctttaccgatttccttaggaattatatcaggtatataattggaatatatgttatttcattttatgtattccatcttttcccgtgaattgatcactcctgccatcttggggctccagcagcctgcccgcagctctctcaagcacttgtcagattttcctgacccagtgaggttggcatcattacaaccactttaaaaatgggaaaattaatgttttgagagagtaagtaaatttgccaaagtccacagagctagcaagcagcagacccaggcttcatcccaggcaccaaagcctgttccctaaaccaaatggtagacttctagcataacctttgcagtggctacatcttgtatccattgtatccactgtgactgaaccagtatttatttggccaataccccattattgcgcatttataatgttgccagtttttccactattatacctgtgacatcagatacccttatatactctttggttattttcttaaaacagtgtccctaggaggggaattgctggattaaaaggcttgctgagttttttaagttattgataaataatgacagattggcctccaaaaataatctatcatttaaaactcccactaatgataaatgagtgttaatttcccttttctttattatgtgttcctttaatcaacaagaaacttaagcacctataaatgaaccatagttcatttatatgtgctgatttttttattattgtaataggtgaaaaattatacatttgtttagtggtcctccaataatccaagagaaaggcagctaagaaaattctacggaagaggaaacagatatgctgtgagtttcagtagcacatccaaggtcgcgcagctggtgaggacagagctgggattaaagccatccagctccaaaagcagtgctctcgcccttctgcctccctgccaaccccctggaaccaagagtatccaagggtttttgtgcaatttcctgtcccttcccccacaagctgcatattttgagcaaagtcagtaaggggaaacaaggggaagagctgacggaagagaaagtcgaaatggggtgatactttacaagcttccaggctaacttgaatgtcatggatatcctgattctgtctgcctgaggaatcccagcagctgatagatgccaaggcgatggctctacagtcccgtggcaaatgatatcgaaactgaatcagactctagaaatcatctgcacaaaacccttcatttttaaaatgtcagtacagaagcccagagggaatggctgcctggcaccctgtcaggtgctgagtgacagcagcagagtgattagaatctggggcttcttaagcttcagatctgttctccttccttatattcttttctgaacaagctcagatggctcttgaccctttccactaataaccagccctcttctcatcttggcagtcccagtacgagaaggaaaggcgaggtccctgtcaggtatctgggatttttatctctatctctcacccttcacaatccttctcatacaatttaaaactcctctgttgaaaaaaaaaaaagaaaaagaaaaagaaaaagaaaaaaacaacaatattcccagccctctgggaggtcaaggcaggaggatcacttgtgcccagggggttgagaccagcctgcgcaacatagggaggtctcatctctacaaaataataataataatataaaaattttaaaagaaaaaaccaccaacaaaaccacaaactggaaaaatgtttgcaattcgtattcagatatatatgcagatattaattcataaggaggtcatacataaatttttgaaagataattctatgaaaaatggcaaatggagataagcagccatttcagaaaaaaagaaacacaaatggccttataagaagcagagtctcactcataattaaattcaaataagaataatagcaattactaaatgatgaaagagcaaaaaaaatgataactcattttaaataaaattagcaaacgtttagaaaatacctgtcaatctttggcttctcttgcttctttgtcgtgttgttccagtaacagaaggaaatgcttgccagtatttgctttactggttaaacaatttaatctctcttgtcttaattccagtcaaatgaatagaatagtttgtttttctcccaataaataaaataaaacccagttctcataaggaaaagatgtttacttaaagcatagcttgccttgccacagactaggagaaaatatttgcaatacatacatcccataaatgatttgtatgtccttatataaagtactcttataacttaataagaagaaaactcaataaaaattgacaaactagttggacaaacacttgaccaaagaagatatgcagatagcaaataaacatatgaaaagatgctcagcaccattaaaccattatggaaaagcaaattaaaactataatgagctatcactacacatccactagaatatctatggttaaatagactggtataccaagtgttggcaaggatgtagagaaactggaactctcaaactttgctaatagaatgtcaaatggtgcaaccgctttgcaaaacagtttgtcagtttctcagaattgaaatatatgttaagagtataaaaagataaattagagactgggagaaagtgttttcaaaccatatatctggcaagactaccatctaaaatatataaagaactccccaaattaacaaaacaaacaatttgattagaaagtgggtaaaaaacatgaacagatatttcactgaagaggatggacagaagacacataagcacatgaaaagatgttcaaaaccatgagccaggagggaaatgcaaattaaaaccaaaataagatctcaccacacgcctatcagaatagctaaaataaaaaataatgacaacaccaaaagctggcaagcatgtggagaaactggtttagtcacacattgctggtggggatctaaaatggtacagctgttatgggaaacaattaggcagtttttggttgtttttgttttgttttttgtttttttgtttttttgacatggagtcttgctctgtcgccaggctggagtgcagtggtgcaatctcggctcattgcaacctctgcctccagggttcaagcgattctcctgcctcagcctcccaagtagctgggactacaccacgcccagctaatttttgtatttttagtagagacggggtttcaccatgttggccaggatggtctcgatctcttgacctcttgatccgccctcctgggcctcccaaagtgcttggattacaggcgtgagccaccacacccggctggcagtttttttaataaaattaaacatacgactaccagagaacccagcagctgcactcttgaatatttagcccagagagatgaaaacttattttcacaaaaatctgtacacaaatgttcataagagcttaattcataacagacaaaaactaacaaccaactgtccctcaactagtgaatgattaaaaggcacaactcgcatgtgcagactgagatgaatgtgcaacttagacgaatcttaagggaattattctgaatgaagaaaagtcaatcccaaaaggtcacatactgtatgattccaattacataacattcttggagtaacaaaaattgagagatgggaacaagttagtgggttccagggccaagggcagggctgggtcgcggggaagggaggtgagtgtggatgtcatgggcgcacacatgatccttgtgggactggaactattttgtatcttcgctgaggaggtggatacataaacatacacatgtgataaaattgcatagaactaagtacaaatctacaaaaatgagtacaaacgagctagggagatccaaacaagatcagtggattatatcaatatcaatatcttggttgtaacattctactataactttgtaaaatgacaccattgggggaaaatgagaaagatattgttttttacagttgcatgtaaatctataattttcaaaaaattaaaagtttaacataaaaatattaaacgtactcttaccatatggacaagccatttcatttctaggtaattatcccagagcgatgaaagtttatgtctacatgacaatcccagatcaaggaaagcctatgtctaccaaaaccagtgccaaaaagtttataacagtgttatttctaacagctaaaaatttaaaacaatccaaatgtttctcaataggtgagtagataaacaaattgtcgcatacccatacaatggaatcctactcagccataaaaaaaagaagaaactattgctacacacaaccacacagatgaatcttaaaatcattatgctttagtaaaagagaatacatactgtaatgtgtgattctcttcgtgtaaaatcctagataatgaaaactaatctatagtgccaaaaaacagatcaataactccctggggaaagggttagagcaggaaagagtgggagggagggatgacaaaatggggcaaggaaattttggagtgtaataaatatgtccattatcttgattttgtcacagatatatatgcatgtatagtatatgaagaaacaacaaattgtttattatgtatcacatatacctccataaagctgttaaatgaacaacaataacaacagcacagcttgccttaaagttttccatttcaccaacatacccggcactattcaattctttccagtatctcttgccccagctcttgaggattaggttccttacagcggtgtgtgcttcttgacttgctgaactgttactgcatggatttccttcatgtttctatatcttcctatcagatcctcttaggagtttgtatcaaaagaactggaaataataataatatcatcccaacagactcaaggcaaggagaacagaagctactgtcatctgtcatggagaaggaaactcgagctcagagcaattgaatgatccaggtaagatacaagtccagggctgaagcatcctggtccagtgccctttctagcacacctcatggaacaggggagaatccttttccttctttccccttacttgagccaggaaggtcagggaattattgaaaccttcgtgagatgattcccaagagaggaggggctgatcatctaattgatctgtctgagtctgagaaattcatcgggtgaaatttgacaagaggatgggtagtcactgaacgaaatgtgaaggatatccacacatgggctctctttccagtcctctgcctccaagcctgggtgattatgtccagtcccatctactctggacagaccatcctagatccgaggagcaggaatcaatgaggtctcctggatcaaagctacattcaactgttcagttttactggggagctctgccttgggagtgaggaggatttggtaggttcttatgtgtttctcactctgtcttggcagggagaaggggtgtgtatcagaattcaagcattaaaagccagtttgcaaatccctagctgcaaatctccatggctctgccatgccccacctcccgcaaaagcccaagccttgcctgcagctcgggcgctacttcccttttgggagagagacgcagaatcttaagtaaggttaattttatgatccaagtggactcctcagagcttctcaaatggggttagtgtggcaaaagctgctagttgactacattaacccttccctccttggtaacagaactccaaatgtgtacattgttaactttaaaaaaatagactacttccagtcttccctgcagttaagtatggcctatggccatgagaccaagttctggccactgagacatgagtgggagtgctgtgttgggcttacagaaggaaggctgcttaaaagagctgcccgatatgagaggggcttgtctttcctcctttctgtcacctggaatgtggaggtcttggctgaagttctgttagccatctaggactaaataatgagggagccacgtgctgaagatggtgcagcagaagataagagcttggcatcctgatgcccatgagccctccagcctgaatcacccacttctggacaatgtgtgtgcgagagaaataaacttctatcttgtgtaagtcactgttatttcttgggtttctgttgcatacatctaatcctaatcttaaattagtgagccttctctctttcttcccatagcactttgatggctcattgggttctgctggattatctctttacacatatttacatttctctactagtctatggctttggtaacagaggggaccatatattagtcatctgcaggtgcctggtaccttcctgccttgcacacagcaggtaccttttgaatatgtttgaatatttgaaggagagaaggtccaagataaaattcaaaagctgtctggagttggaatgtcctataaccttcacccctggggtaactcttgctcctctatagacgattcatgaagaccggccccagggttttccttgctggcaaactcaactagcggggcccagaaagaagggtgtaaaaaagccattgttggctcccctcccacccatccaggaccttccccctcactcacagatgacaaagccaaggctttgtttaggcaaagtgcagcattacatttctgacctcttggtccccaaccaaaactctagaaatggagagaaaaaaaagtctccattcccccattattccttgcatatccaagtcaacatttatttaaaatatccaaacactattttggtatagttttctccctctcagatttctaccctggtattgaaccttctatctcctcttctatcagctgcacattcaacatttccacctctttatttactactctccttttttctgtaaatgaattcattaaataaaattatgttggaggcacccaattaatgcttcacattgtacaaggtgcttggaatatgaagacaaaaaatatcattccaagttgggtttctccactagatgcaaacaaacaaaatacaacttggacggtagctatcctggcgctcagtgccacacacagtggtggccttgaggaaggaccccctaagcttttcccagacagttgggagaggctttgtggagacaatggaaatcgggcagactcttagaggacaaacaggatttcaccaggataaaaggggaaggacaacgattttgtgcaaatgtgagtcgaacgagaaataccctatacggtctgagctcatgctgaatgaggcagattgtggcaagaagagggatggtcagaggtgcagctggattgatggacaaaggccaggccaagcagggtccagggagcattatgtcccagtttgcacttgcacctgtaggcagtagagagacatggaaaggatttgtgcagtggagaactgaagtcctcaccattatgtcccactttagagcaatctttctggcaagaacatagaggatacacagaagtgaggccagtagcaggtagcacccatgacgctctcggtgagaggtggtggacgggtcagcattggagaaggatggatctaagagatattgaggccttggaaacaacaggactcagtgcccactgaatgtgggggctagtttgactgtgtgagagggtgccttattgataaatgcaagatagaaaacaccccattttttctcttttgttttcatattatcctacctgaaagaagaagaggttacagatagagggagacatctacgtggcacaggcagctctcagcagaggctgagcaaggggagatgccagcccttcattgtatgctgcccagccctccccctccctctcctgacttcaggctaacccatacctatctccgccttcctaagacctgacttttgcccagataatcctaatctctaattttgagagcctttcatttccagatgataacacatggtggacgatgtgctgtctccatgatgtgagcacccaagaaacaggggagttggcacttgcttctttactgacagatggtcaaacgcacagtggtcagcacctgtgaatcccaggggaggccccagctggcctgaactccagtgcatgacaagagggatgagaaacatatcactctacagggctctggcagcatccggaactggcataccattgtcgaacagagtccaggggtgtgttgggcacaaagacgtgccacacagatgaccacgggccttggggcttggacaactaagagagttgcctgggccagacccatgctccagccagcacagttccatcctggcagtgagaaggacttcctatttgtactacctggggaagaagagaatttgtgggtaagttgacatggtttggatgtttgtcccttccagatctcatgttgaaatatgattttcatgttgcaggtggggcctggtgaaaggtgattggatcattgcagcagatccctcatgaatggcttggcaccatccccttagttataagtgagttctcatccagtcggttcatgcaaaatctggttgtttaaaagagggtgggacacacacccccttgctcccactcttgtcatgtgatatatcagctccctcatgccttccgctatgatcataagcttcctgaggccccaccagaagctgatcagatgttggcactgcacttcctctacagcttaaagaactgagagccaattaaactttttttctttataaattacccagcctcggacatttattatagtaacacggtaacagtttaacacacaagttgaatccctcttaggcagaaaataagaagaatacattttcatatgaaagcaagtaagttaggcattcacaccttgcttgatggagatacagcaaggggtccaggtatgaaaagtcttagactccttctgcctcttctattcattcatttatgggaagttccagttgaagtctaaccatgaaggaccctgaccaggaaccacggacccctctggatttggcaaactggacagattatccagagccaagctgaatacggtgttctggctgctgcagctaaaacactgttgtcaatcccagaaaactgtcgaggcaactgccaaggacatctcccagctgctgtgtcctcaagctccagtgagaaggcgtgggttaactctttaagtctggctcctgactcagtcctttaggcttgcccgtgggcactcccttggattcaagactgggcgtgatgctttttgccctgtgaccacaaggtagtaagatgtgttcataacatcctagagggttagggctggagttgacttcatcgtgatgtggctgaggcctttattttatagaggaggaagctacagcagagaagagatgtgactcattctatgagctaagaactgtgccctggccaagtaatgctggtgtagccaaagatgtgtggtccaaacatcatctagaaagtgtgtttgtgtttattcagctctccattgtggaaggagacagggaggggatgcatctgacaacttcaaccaaacccaacactggtgtggcccatagtggagtaatatgtctcccagtgaatgcaagacaacctctaagcctaattttttcattgctctgagtatttgttcacaaaacactcttgactactagatcccaaggtgtcttgatcgtagaacacaagttccttggaaagtgatatgaagccatagagatagatatcctactatagcctcatattcattggcatatcaggcccttacgagtttgctaaatgtgaattacttttcccagagtgagatgatccttgtatccatccttctgcaagggtgaccccacaggctctgcctggaggagccaatgagatcttctcactctactacctctcaatgacaacaagcagcagatagcttctctcatctagtggatgttaggtgattttggttagtgttgtctcagaaaagtagtgagtgagtatgcctcatgcaccaccaaccatgaacactgaccatatataaggaggcagatcatagaatcccattctttatccagtagctgattaatcttcagatgcccccaatgccccattctctacccctcattcttctgagtgatccctcttttctcttctttctgtgctccagtctccaatacgttttcttattcttcctttcctaataaaatgtctctcagaagaattatctgaaaaatgccttgggggcaatatctgaggctcttttctctcctctccattccctctgcccctggctttattcattcccgcccctttccacacccagatattaaaacagccctgcaaccggtttcactgccttcgttgctatccgactcagctctgttctcatcaggacacttccttacctagatacagtcagtggctcctcactgcatatggaatagattctagactccttcattcattgtgcagagtcttgcacaacctgaactcagtggttctttttagtttcatctccttctctttcgccttcattggccttccctccggccagcacatccctctgtgtttttccagttcttacttacacagccttccatttcctggcttcatgctcaatctgcttggaatattttttccccaaccctcacttccgtttatctaagtcttacccatgtgtatgagttaggattcattaggaacaatagagactagaaataacaggtttaaccatgatcagagtttgtttcccctcatatagacatttggagactcaggctccttctagtccattgccccatcatccttagaatggtccaggatgggccaggtgtggtggctcacgcctgtaatcccagcaatttgagaggctgaggtgggtggatcacgaggtcaggagttcgagagcagcctgaccaatatggtgaaaccccatctctactaaaaatacaaaaattagccatgcatggtggtgtgcacctgtaatcccagctactcaggaggctaaggcaggagaatcgcttgaaccccagaggcagaggttgcagtgagccgagatcacaccactgcactccagcctgagtgacagagcaagactccatctctcaaaaaaaagtccaggatggagcctagagttccattcactacatctgttatttcatgaatctgggtgcaaaaaaaaaaaaaaaaaaagataaagaaaaagaggaaaaggtgtgtaccagctgtcttttggggaaagttcctggaaactgacagttctaacatttcagcttacgtcttttggaacttaatcatgtgatcatatctagctactacaaaggctaggaaatgactcgattccaggtgactatattcccagttaaaaattaggtgctctatcattgtagacagagagaacagctcttcatgtctgctgcacccttgttcagcgctacctatcctgcccaattttgtttctgcaccacctcctccacaagccttctttccatctcctgaactcctagagtagtctctctcatctttcctcctagcacatgacacttcttaccctcttatgaccacctatgttcttttattatgtcccctgctgacctatggtcaactgcagggcaggattctgtgctgattcatttgaatgcctcctgtcctcaccaccagtggctagagaggggacaatatttaccacggtggtccacagttccctagctgttggcaaaccttctcattctgatccactgtagatgagcatccttaagagcatggatccattttagtttcagatcctctgtttttcttgaatccagatacatgttcacatgttgcacagtggatgaatttgagtgacacccacacagacttacccctcccttccaaaaattggaaaaagctttagcacacctgggtcctcatgccttaggatgggctccctcccaggatccacttcaggctctcatgaaaatactcttgtcaaggttcaccccattcctctttcatggacatgtctggattccatcttgggcttgtaagtggttacataatcataagctgtagcataaataatcatagactgttatataaacagtacccaaagcctctggtgctgtgcatacagggtgtgataaacgataaacatttgatggatggataattattgtctccaatttgccagttctccggaccatttagtcaggcttaatgcggaccagtttttgaaatgcgggtagataaccgtggaatctcagttgaatgtacagatgatgacagtgaggggatgtattataggtaagtcaacagaaaccttgtcatacaagtggaaggtaaggataaccgatggtgtgcaggcacagaaacctgttctgtcttcaaaaatggtttccagagtcttgtttcatgagagatgttagttgcttcttggacgttacatcttagccccacaacaacttgaggctatgagctccattttacagatgagaaaactgacacacagagaacagaacaaccggtttgacctctgctacctaaatctagatttatttatttatttattttgagaccgagtttctctctttttgcccaggctggggtgcaatggtgagatctcagtttactgcaacctctgcctcccgggttcaagtgattctcctgcctcagcctctggagtagctgggattacaggcacacaccaccacacccgactaattttgtatttttagtagagatggggtttcaccatgttagccaggctataaatctatattttaatttaaacttggatctgtcttatctgagctcaaattatcattatccaagcagatccagtggggtttttgctactgcatggccgtttggatacttgacgagccttttggaacatgctggggtggatgggcaatgaccatcgacccatacagcaaggccatgcagagcaacccatacagagaggccgctagggttcagcagcatgagagtggcccaggagggaaatgatcccttcactaagggctgaacatcaagggcgggtttgagcagaagcctcctgaccagatgtcaggaggccatggagagggttgcatttcacaaggttggtgtctatctccctactgactccaggaccgtaaccaaagcaaaggttcttcagccaagaggagagcaggttgctcatgaagaatgtggatgagaacacggacttaaaaagtcaatggaaaatggaatgacaatgtgaaggtacttagagccttttgaaatgtacccttaaaaatgactgggtaggccgggcatggtggctcacacctgttatcccagcactttgggaggccgaggagggtggatcacaaggtcaggagatcgagggcatcctggctaacacagtgaaaccccatctctactaaaaatacaaaaaaaaattagccaggtgtggtggcaggcgcctatagtcccagctacttgggaggctaaggcaggagaatggcgtgaacccgggaggcggagcttgcagtgagccaagatcgcgccactgcactccagcctgggtgacagagcaagactccgtctcaaaaaaaaaaaaaaaaaaaaagaaagaaagaaaaaaaagaaaaaatgactaggtaaattttataataaattgtatgttgtgggtgttttaccacaattaaaaaaaaaaagtcaggagaagaaaagtgacaaattcacacctagatcaaactggcccagtgtgatttccaatgttataagagggaaggctatctggtttcatcctttagactctaggcaaaaagaagcaactttggtacaagactggacaccatgtcctggaactggaataaagaaggatgaaaaaaattggtcaatagcattctctgcccacctactgagctcacgcaattagctctgtgatgcaggccactctgagtccagcttccctggtaagtcaaaggttgttccatcacggattttgccatgataatgaaaaacaacaactggggccagacgcagtggctcactcctgtaatcccagcactctgggagaccgaggtggatggatcacgtgaagtcaggagttctagaccagcctggcaacatgttgaaaccccgactccactaaaaatacaaaaattacccaggcatggtggcgggcgcctgtaatcccagcttggtcaggagactgaggcaggagaattgcttgaacccgggagatggaggttgcagttagctgagattgcaccactgcattccagcctggacaacacagtgagaccctgtctcaaaaaaaaaaaaaaaagaaaaaagaaaaaagaaaaagaaaacaaaaagaaagaaagaaaaaagaaaaaaactgggtttcttatgcacttaatacctgccaaaaggtgctctggtaagccttgtgctgactcgggctgagggactcagggtcagcgttagagaggagacagtcgggcctgaaggaagggtgggagaggatagggcagagaggatctaggggaggctgcagacctaataactggggtgggggaagggtgacgccctgcctttctggacaggctctgcccctctgaatgtgagggaacagcacattcagttctctgtggttggttgaagactgataacagatcaagaagtctcttaagaccgtatgtattttctgtttaaattcaagttcattttttggcaaggattccttcaataattcaaagaactgagattttgctttcataaatctagtgttctgacctgccaaaaatatttgcatttatgaagagcagcagtgtccttggagagcaaatgagcagagtcacgggaatgggcaagcacttgccatggccaggcgaagggtttgccagtgtgcttgctctcaccaccaccccacccctgtcctagcccttcgttgccatatcccttggttatagtcaaaggctttttcctggggtccctgctaccagcttctccagaccccaatctacacattcaggtgcagaaacgtcttcatcaaaggctgcttcagtcttttgctttcttgcttcggaacccagcagagatcttcaatcccccgtctgagcctcatcactgtcctcagatcccagttcaccttcatctctcattcctgtcacctctcactgtctccattagcaccagccaagcccatctcattaacaaccaccgcagacaactggtcttttctggcatctgtgctttgtcatgagtcacttcccccattataaaacctcctccctcttcatcaattcagggccaccatctcctgcaggactcagctcaccgccactgggaaatgttccaaaacagccatttgagaattggttcattgtgcccggtgtcgctcagcccagagaccttcagtttcaccatctccagaaggaaaaataatgtctggtttcctatcagcacggggtacaggcagtgtcctggctgtgcagatggaggaggaaatggtgggggggggtctctaacattttcttaaacagtttttcaaggcatgttccctttttttgacctctgcttctaagggcacatggtgctgccattcctgggccattagagggttctgtggtctaaattggacctgctttttgtctttcttcactcatggttagcaaggagctttctacatctgctaaatcagttgctatttgtccatgtgctttataccttccaaaaagctgctgcaactgactccaccctccttttctgtatcctcgcagctttctgcctttttgttccttaacccctctctgtaatgttgatagagttccacaaacatgtggccaagctgcctctttaactgggaatcccaagtgaccgtctgctctttgctgccatgttctctctcccctgaatgtacctcccctccccggctgtataatagactcctggtcactgtgcctgccactacagagtgcagctctctagacacacacagagatggcttttaacggatgtctcagcagcctctgttgactgtgagccattccagggccacgtgagtcactgagcttcctccagtgtcttgttctgtctgccagggctggccaaagccctggggagagaaactggtgtcccttcactctttcccacttggcaagttatgaagtacattcattgagctacgtcctctgtcgtgtcacacgtttcccattgggtctgtgttgggatatggaggtacggtgtcaatcagacaaacgcagccctcagcctgatgttcttatttcccccagagaaaacagaagatgcttggggttaagacactcagtaagaagagcttcatacccctgggcctacactgactgatgacaccctggtatcggatctatttctgaacattagggagaactgccgaggtccagctctgttctgagctcctgcccttccccatgcacacatccggtatacactgtgctctaatccgccaggtgccccagagacaggcaaggaagaactgacccaggttggcgggttattccttccttctacctatattgttggagttatgggccttgattggtggagagtttgggccttgattcaaataaccagaactggccagacttcctggctcatgcctgtaatcccagcactttgggaggctgagacgggtggatcagttgagcccaggagttcgacaccagcctgggcaacatggtagaacctcatctctactaagacacaaaaattagccaagcgtagcggtatgcacctgtaatcccagctactcaggaggctgaggcatgagaattgcttgaacccgggaggtgaaggttgcagtgagccaagatcctgccactgcactcactctagcctgggcaacagagtgagacttgttctcaatactactactactactaataaataaataaataaataaataaataaataaataacctgaactgagaccccagatttaatcagatccattagagggagggcagcatcccaaaattcggacccaagaaagcaggaacagggtgactgtggtctcacattggagtgcatgatcaatttgctcatttcttaagtatgcattgagtcccttctctatgcaaactctgtggttagatgctgggggttcaagaaaagcaagtagccttggccctgtactacaggagattagaagctatagaagatgcaaccaggtaaatgggtatcctctgtgtggcaagtgttatgccagggtgctagagacaagtaccaggagacttcaaactgttcgtggaaaaaatggaattaaaacataaatgttaaaaatgtaatctttatttctcaacataacctccatcaagttcaacacacttttgtaagcaatgataccagccatttagtccatccttaaagaaatgagggtcttggccgggcgcagtggttcaagcctgtaatcccagcactttgcgaggccgaggtgggcggatcacaaggtcaggagatcgagaccatcctggctaacacggtgaaaccccatctctactaaaaaaataaatacaaaaaattagccagtcgtggtggcgggcgcctgtagtcccagctactcggaaggctgaggcaggagaatggcatgaacccaggaggtggagcttgcagtgagccgagattgcgccactgcactccagcctgggtgacagagtgagactccgtctcaaaaaaaaaaaaaaaagaaagaaagagatgagggtcttgagaatttaaccatgttagtgtagtcttttttttttttttttttttttttttgagacagagtctcactctgtcacccaggctagagtgcaatggcatgatcttggctcactgcaacctccgcctcctgggttcaagccattctcctgcctcagcctcccaagtagctgggattacaggcgcccgtcacaatgcccagctaattttttgtattcttagtagagatggggtcaccatgttggccaggctggtctcaaactcttgacctcaggtgatccacctgcctcggcctcccaaagtgctgggattacaggcataagccatcacacccggccccaatgcagtctttttacattattaactgaagaaaaatgggtgccctttacattttttttaattagggaatgaaaaaacaaagacagaaggagccaaatcaggactgtaaggtagatgcctaatgatttcccatcgaaaccctcacgaaatttccctgtttggtgagaggaatgagcaggagcattgtcatggtagaaaggactctctggtgaagctttcccaggcgtatttctgctaaagctttggctttctcaaaacactctcatagttagcagatgttattgttctttggccctccagaaagtcaacaagcaaaatgccttcagcatccaaaaaatattgttaccatgacctttgcctttgactggtccgcttttgctttgactggcccccttccacctcttggtagccactgctctgattataatttgtcttcaggatcattctagtaaagctgtgttttatctgctgttataagtatttgaagaaatgcttcaggatcttgatcccacctgtttaaaatttccattgaaagctctgcccttgttttcagctgatctgggcacaacaattttggcacccatcaaatggaaatttgctcaactttaatttttgagtcataattgtataagctgaacctttgagatatctatggtgttggctttggctatcgtctctgctgttattcatcagtcctcttcaattaggacgcaaacggtattaatttttcctttgaaaactgatgtggattgtctgctaccgtgggcttcttcttcaacatcatctcatcccttcttagaacaatttatccatttgtaaactggtgattgctttggggcattgttcccataaactcttcattaaaaaaatcaatgatttaatcatttttccacccaaacattaccatacatttaatggggttctttttgtctgtttttttgtttttttgtttcaattttaatagaattcatgttgctctggtggaggctcctttcaaactgatgtcttactcttcttactgcctcaaactagatcgtgttcacgcacatcataacaagttagtgcaagtttcttttgatgccaaaaaattttgaattcgtacatagttttttcaccatacccactttccatgaactttttgaaggcccctctcatgtgatcccagtctagggatcaaggctgactccaaagaaaggtggcatctgttgtgaatgatgagtgagacttaggcaagcagaggaggcagcaagaggccggagctgaacctagaattccagcattgttccatgtggcccactggagggttgtggtggaatgatgggagatgagggagctgcagctcgcacaggcttaagggtcaacaaagagtgtgaacctagcccagagaacaacggagagccaccaggcagtcctatatagggacataatttaaattttggaaaatgtctctgatagctgagtgcaaaatgaattgcagggagaggggtccaggtcgtggcaggaagacgagacctcagcagtggtcccagggagagaagacggtggcctgcacatgggaatacagtggagctggactctcagatcttcagagggggagaatcagtgggatttggtgatggattcactaagggggatgaggtttagggaggtggctggatggtggtcctgtttctggtttgggcatctgtgtggtgacatttaccaagacagggaaccccaggagcaattctgcaggactcgctctatcttctttacttaaaaaaaggcgaccgtgagaactgaagatgcctcttccaggaaactgcactccacaaacttgaggaaggggccagcagcaccttgaattcaccagtcctttctcagcactgctcactgccagtgcactgccctgctcctcaaactgtctctataattggactttgtgtacaataagtactcaagaaaacccagcgcctttggctgactcccatagcatctcaaacctagccacagctatacttgatgatttcaggtgttactctctggcccctcactgccctgtaccaacacacacacatatctcaggcaccgtagcagcctacaaacccaccagggcctctcttcactcctgagtcatgggtgcacacctctgcctggagctcagcccccagccaccctctccctattctcaggcctatgctcaaagcctaccagatccccaggcctcctgaaatgtctcttctagctaaaagccgagcagcgaatgctgtgtcagcctgaacctcctctcctgcattcctatgttcaatcacacagagacaggtaagcaaaaagacacaacccatcctcccaccatacaaatataaccacctggttatcttggcccataaggtccagactctcagaaaagggggtgtccccttaatagtgctgagctgaacttaacccagggaagaacacagggctgactcagatgcagtctctatcagccagaaggggaacaggcactcacccaactcactgcagtttaaagttaactgtcattggtactgttatgggctgaagtgtgtcacctactccaaattctcatgttgaagctctaacttccaatacctcagaatgtgactgtatttgaagacagggtctttaaatggcaattaagttaagatgagatcttatgggtgggccccgatccaatatgactggtgtccctataggaagaggagattaggacacagacacacacagagggcagagcatgtaaggacacggggagaagatgccatctacaagccaaggagagaggcttccagaaaatggttcaaaaacctgctgacacctcactcttggacttctagtgtccagcactgtgagaaaataaatttctgttttataaaatactctagccgcccatctatggtattttggatggcagctctggcaaactaacacaagcgctacaacagagacacagaaaatgctgcaggaacgcaaagaaagagacagaaatccccaggagaagcgagtcagcacaggggttacttgtgtgggctccagagtggactggctgggttccaacctccctgatctgctatttccctcgtgagagtccccacctggcatggtggttggaaggattaataaaatgaagcagggacagcaaggatcagagagtgaggcaccgtaaggccagctatttacagaggaaacctgtgtcacctaaactgggaacccggagacagaggagactgcagggctgctggtggaagaaaggtcctgtccagcagaggggaccccatgagccagggctcgtggttgggctgggcaaggtccaggaaaagcaagtcacctgggggagctggggccaggggagggaggcctgggcaggaaaatgggggtgagatggcagaggggaaactggaacaccagactagattctgttcccagggaaagagaaaccatcagatgtttgtaaagcaaggaagtggcaagatgggaagggaatcccgacaaagccgccagaaacgagattgggattgaggaaggagaaacagttgcaggcttctgtgatgcagaggagaggccagtgagtgatttgcgttcttctatttgctcatctgaaatattaatttcaatgtttgcatgcataagcaatgcgagagcccagacgcagccgctcctctccagctcttaaaagactttctgtgaagtgttcctggaagagacagttaatgccttgccccgcttgccccgaaattgatttctgagaaacagggccctgcatttacgagctggccgcggggacggaggatttctcagcccagcccctcggcccatcgcacctcctgggcatgggtatgtaaggagactcaggagcccaggttgccaaagagagagtagtctttagggaattcagtgggcagtggctaatgaataaatcaaagactgccctctgtgctcctccatttagcagtgccatgctgtttaacctttgatcagacagtgtgagcacgtgccctgtctttctgcaggaatggagactggctgtgccaactgtcatttctttctaacttacccattatctgggtagcagaaaagtcgaaagttgccggtaggttggatattatctagttcaactctcctgttctgcagatgaggaaacggaggcccagagaagagatttactcaaagttttccaggtttgttagtgcgacagatgacactggaactcggatgcagtgactcccagcccagtgtatcataacatttcacgtccactggaaaagtgttgcctaacacaaatacaacacaagccatgtgtgcagttttaagccttcaaggagccacattaaaaagataaaaagaaacagatgaaattggccttaatttacagacacaccagggacatgttctaaaaaatacgtcattagatgatttcattgttgtgcaaacaccgtagagtgtacgcacacaaacttagatggtatagatcccttatcatcttaccggaccaccgttgttatgtggtccatcattaatgaaaatgtcacgatgcatgactgtattctgttgaatgcagtatatgcaaaatatacagattctgtctgtgtacaccttcccattcactaggtcggatcactttctgtacctgctcaggcctagccaggctgagggtggaaaggtaggagtcagactccaaatagaagcatgaaggcctctccaaggaaagccatcaattgcaagcccatgaagccacacatttagcagaaaatgtgcacttctctcaggagcattaagcatatagggaaatattcccataatcaaagtgtaggctgtggtagacgctgtcccagccaacaacagacagaggaccttttatccagccacccatttccagggtgctttttgctgacaagggacgcctgtgggctgctggtattctatctatctcttgaggtggctggacgtgggtggccatgccaactcctgggcagaatacttgaacagaagtgcctggggggacagaagactgcccctcaccctggggcacttatgaggtcagcccagatgactcatatggaattcccaagccccctggatccaggaaactactccaacctccggagttcattctggaactatgccaagtgccagaaatccacttctatccaaaagttcagaattctattttaattctcctacaagctgctgcctgctgacttggcgtccgccctcctcaaaggtgtcaacacgctttgagggccaagtgcttcttctctgaccctccaaacaagttcccatgttggcgccacaaagcaggtggaccacctagagctgctgataagcagcgggttcccacaataacaaacccctaaaagcaaagttggccttttccccaccaccagctggtccatggcgcggcttacctgagtgctgatcaaggcagatgctgccatcagaggagttaagaagttcctgggacaacaggtggtcccagtttgattgtgcagagcttgaatctgcaactatgctgaccaacccatgtgggctattgagtccctgaagtgtgtgactcgaccaaacggagacatggttggtgtaagtgcaaaatatgcaccagatatcagacatagtatggagggggaaaaaggatataaaaatttaaaattcctcactgaaaatatttctgttgattataggtcgaaatgatattttttatgtattggattaaacacaacggattattaaaattacttttacctatttttaattttaaggaaactattttaaaattacctatgtggttcacgttttattctcatcagaccgcactgttctagtggaagcatttcattttggggtgcaattctgatggcattggctgagatttggctagcagtgtggggacggatggcatgagcctggtggtcactatccaggacatgggatgtgaagtgggaggactggctggggatgctgttggacatgagaggccacacccccatcccctgctccattcactgccctgaatgtgcagctgaattcattgccccagtttaaaccatggaacgagaagccatcagcctaggcccaggtctctccactgctaccactgtggtatgccccagaaaacctagaacacgatgctccaaaggaggggctgagctgtttattgcttctcgccctttagaaatggaagctaaaatttagggctgaatttgggggccttgtcaacacaaaggatccttgctctgtatcttgattttggtgatggccatatgaccctacacaagtataaaattgcacagaactaaatacatgtacacacacacactcccctatattatttcctataactgcatgtgaatctacaatgatctcatagtttaggtccatatttgaacacccatattcataccaccattattcgcaatagccaaaaggtggaataccctaagtgttcatcaacaatgagtggataaacaaaatgtggcatattcatgcaatggaatcttattcagccttaaaaaggaaggaaattctgccgggcatggcggctcacacctgtaatcccagcactttgggaggccgaggcaggcggatcacctgaggtcaagagtttgagaccagcctggccaacatggtgaaaccccgtctctactaaaaatacaaaaattagccgggcatggtggtgcaagcctgaattccagctactcaggaggctgagacaggaaaattgcttgaactcaggaggtggagtttgcagtgagccgagatcccacactgcactccagcctgggaaacagaatgagactctgtctcaaaagaaaaaaaaaaggaaggaaattctgacatccactacaacctggatgaaccttgaggacactatgttaagtgaaataacccagacccaaaaggacaaatgctatatgatcccactcatatgacacatactgagtagccaaactcgtagagaaagtaggatggtggttgccagggcctgggggagaggggagtggagaattgtttaggagctctggtgtttcagtttgggaggataaaaagagttctatggctgggtggcagtgacggttgcacaacaatatgaatgtacttaataattaagatggccaggtaaggtggcacacacctagctgtggtcccagctattcaggaggctgaggtgggaggatcgcttgagcccaggatatctaggctatagttctgggctatgccaattgggtgtccgcactaaattccacatcaatatggtgacctcttgggagcaggggactaccaggttgcctaaggaggggtgaacccgcccaagtcggaaacggagcaggtcaagtctcccatgctgatcagtactggggatgcatctgtaaataccactgcattccgcccagggcaacatagcaagacctcatctctaaaaaaataaaaatgtttaaaatggtaaattttatgtcatgtgtattttaccacaattttttaaatctaaaaattaaaaaaaagtcagagccttttgacctaaagatcggtgcctctcttttacagttcaccctgttcaaggaggtgaaccaaaaagctatggagcccattagaaggaaccagacttccagcacctgggtaaataacctgtaagggaagcaggagcagagagtggtccttggtgaggtgctgggtgccggggaaggtgggggccaggttggtgcctggtgcctgtgctgcaccccagtcatccccagcacactgagtacccaggtggagctcttgtgccacccaaaggtgaaattaacctgtgattacaaagttagctttgatcaaaattgttggtaaatgtaggggttagggaagtgaaagcgctagaaggaggcatgaatgcctagggctgaaaggggatggagaaggcaaggacagatcccagggtcagcaaatcgaatctacttagggtgcgagatgcggtgggcttttggggacatattcttctataccgtatcaccagagatacaaaggttttttttgtttgtttgtttgtttgtttgttttggcaaacgaaaggggtttttatagaccaaccctgttgtaccattgaaatagccccagttttcctaattcatgggaagggcatgaagaaccccctgcgtagggcagggcagggaacctatctgcactccaagcagttggccaccgaaaggagataacttcatgatgcttccattgagaatctctgagacagtagttaggagaagggaactgccaggctgagatttttccgtcatctgatcatgactgagttcaagataacaagagtccgtttttggtaatggaggcatttcaaaagagaatgattttgtttcccttaagttcacataggttggccggaagcccccagactgcctggaatacgcattaaaaacgccagctatctcagcaataatttccagccccaggccatttactaagacacacagcacctctaccaccctgctctgatgcaccgccacggccatcccgcagacctgtgccagacggcagcgccggtgcctctgcacccgaccgcagctgagaacgtgtggctgcccgtatgattctgctcagttcatggtgtctcctcagccactgtgtcctgagccaagagatttgagtgtttatgaaaaccagcattgttttccctcttggtcatgtaagtcatgggaaatttttgtgtggtgatgcataaatcccagaaagtttggtttaaaaagttccctaaagtgtgggtggttcctcaagtatgtccagatttagtgaatatcttgaatccgtagaacaagcctgagagtttcacccaaatgccatctccgtgaagaggccctccagattcacggacaccctcattagtgagttctggcagctggccgttagatgtaggacttttaaactcaaatttaaaatgagtctgcatgcctgagtgagcagagttgctgggaaatattatgcttcaaggcagttcaggccaactctcccacgatctaaaatccttctattaaaaaagttataattcatcccgaataaattagctgtcctctttgagaaatcttcctttaatgttttgcttaatccatcaacaattatttcatgagcacctgcgcatccaggcttggcaatgccacggattctaattccttctcctatcctcactcctcatcctcatcaagaagaggatttgcctctgatcctccaccatgacttgggcagccactgaaaatgatgctttaaataaatgtgttgatgtggaaagacggcagggcttatgaaggagtatgtatttcattccattttcataaatatgtaaatagtatgtgtttaatcccacttttataaatatatattcttgggcagattaatatatattcatgtgtatatttcaataaaacaaaatctaaaaggatatataccaaggtgttagcagtgatgatctctaagtagtggaattaattttcttttcttttagcttctctgtgcattttttctaaaggaaacacatattatatgttaaatcaaaaacggaaaatgttgtaaaggaaacagtggcattgagagaagatggtagttaagtttggtagccatttaaagaggtttacggctgggtggagtggctcatgcctgtaatcctagcacttttgggaggctgaggcaggaggatcacttgagttcgagaccaccctggtcaacacatcaagaccccgtctcgaccaaaaaaaaaaaaaaaatagctgcacatggtggtgcatgcctgtagtcacagctactcgggaggctagggtgggaagatcacttgagcttgggaggtcgaggctgctgtgagccgtgatcacgccactgcactccagcctgggtgacagagcgaaatattgtctaaaataatataaataaataaaaataaagaggtttatatgtttctggttggggaactcaaagttttttctgagactaaagccttctgtacaggaacattttaggcctaaacaaagagaaaaggtaaagtttatatttttcctatgtgaccgggactaaaaaacatacatacataaatataattttatatttttaaaatgatgcctttgcaacctcctccttaaaatgaggaaggaatcttctctagtctggtccagctgattcctggcgctgcctttgttgttcttactgaaacaaaggctgcagaagagactagaaaaagcaaagagaagctaaattgatctgcatacggaagagcataacgctagcaaaaacgggggaaatacacaaaatggggaaggaagtggacagagctggaacagagaaggggagggaaagtagggcagaagaggtgcagctgggattttaggggggaaaagaagtagagaggagagagagagagagagaaggcattgagcaattgctctgtcttgtggcctttggagcaggaggagagaagggaagtggaagaagtggagacctcattcatcaaaagaaactgtagcagagcacgcactttgcctcctcctccagaaaaccttcagtgaagacaggcattgctcttgagggttggggctctggtttgtacctctggggatggattagctgagatgagacttacagctgaagcaagaaggcccaaatttagttggatctgaaattttgttttgcaaaattggaaatccagtcagctgagaactccctaggactccacctcatctggcaagatcaggagacagccccaccctgtctttgctgagcagtgaagggcagtcagatgggccattgggatgggccctaatccagtgtgattctactaaatctgggccttcttgcttcagctgaaaatctcatctcaactaatccatccccggagacaaaaaccagaggcccagccctcaagagcaatgtcgttcttcactggttttctgcagcccctttccagggactccaccatctcatcgtgagccccagcaacagtatttccacgtcactggcatcctgggtgccggtccagggtacccatctggattagtttcctaaggctgctgtaaaactgacacaagctggctggctttaacaacagaaattggctgtgtcacaattctggaggctggaagtccaagatcaagatgctggcagggcaggtcctttctaaggactgtgggaaggagctgttccgggcccctgtccgggcgtatggatccatcttcatcacggcatggccttctccctgtatgtctgtctctgtgtccaaatttcccctttgtttgaaaccagtcacactggattaaggcccaccccaatgacctcactttaacttgatcacatttatagagaccctatctccaaatgaagtcaccttctgaggtactgggggttcggacttccacgtgccaatctggggtggaggagacacaattccaccaccatgcgcactgacagccccatggccggcgcacacccttggtgccagccccagagtgactggcggtcactctgggggcccctcccttttctttcacacgtgctcactttgcagctgtccaggccattctgccctcatctgaggaatttgcagaaattccccagaactcaggcttggtgatttcacccttccctgttttcagccagcacagagttttgtcctaggcttctgtttctctgctgaattcagtagggattgaggagggagcagagactcatgggtgggttcaaaccccttccttgaagctgatgttgctttaaatctgcttccctggagggccacaagtgggccaggacgctgtgtatggtcctgcagacagcttcctgctcctgccccgtcctgcccttggacagaattgggccgtggactcattttcttaggggactcctccaaccctcatggggacacatctgctccttaaagcgtgggttctctgctacagattctgagggaacggtctgtagctggagagactgaggaatgaaaggtacattcaggccatgcagagtcacttagctgaagggtggggcggagatggacagctggacaaaggggcacagagaggttcggcctgaggaaagttgagaggagggactgcattatcatggaaggacatgctgctttgatccggatgaaggagctcccatgtcttctagccatttaggtgcagcaaaagatttgcattaaaacccaagttactggagtgaaatactgaggggaatgtggttcatgagaatagcaatttacatttgaaaaacattttaaatcatgtcttaaaggattcataattgtagggcttcttaaaactagtggttttcattcagaggccccagggcatgcttggatttcccgcacaggctcctgtggccaactccagggaaaaaggagaaaggattggagcagatgccagaagcaccccgctctttcctctccagctcaccctggcttggagcagagacgtcatctatcacttgtttggtacaacaagctcccacacaggattttatttggtaaaagatctccatgattacaaaaaataaatgcatgcatgcatacaagaatatatacattaattccactggtttagctaattagttttccatgcatatatttttataagattatatacatggaaaactcatttacacaggtactcaactatacagtacagatactcaacatacccgtgatttcaaggtcgtaactgctgcttgaaggtggacatgtgtgtctatagttcattcctaatgagaaagatcatcttcaacacaataaggaacacactttaacctaagaggggtgtcatctccagagaggatgttccagccattgaaaacaagaagtgctctgaagcagatcgaactctggcttggatgctctggcagagtcctgtgtgtaccaaattagcatttcaaaatgaagccaagtaagagaaccagctccttcctgaaagaggccatgagggtctaaatgtcccacagatctggctgtctctgtgggaaaccacctcttggagaaggaagatctgagctagcagggccgtgcatcttcccgaaagctccgtgttcctgcttcaaggctatgcttcccaagaaagcagatcacggggttattttcctgacgctcccctcctgggggattaaaattcttatattttgacatgggggcagtgagcagagtggccagaaggacagtctttggtggctgcttggcccctggcctggtttgattctgttcccgaatcattagtggagaactcctatattcaaagaacggtggtaagagctgggagtacaaaagtgagagggaaaaaaaaaaaaaaaccgtctttgcccttaaggggctttggtgtatttgcaggagagagtctcatgaacagatgactgaacgtcacgtggaaagtgctatcctaaaagtgcactgtagcaccaaggagcaccaaggtgaggtagagtccagtgcagaagctagaggcggcctctggagcaaattcacctccactgcctcacaggactctatggattattggtctataaatacctctagccatcacaaatgcactttcgcagaaggattgaatttcagcattagaagcaaccttcctagccgttaaacccttcacggatctgatgctggaagcccctctaggacacacccaccaaatggcttttttgagttgcttttaggacaggatactcactaccatgtggggaggtgcttggactacctgggcgcccattgagaggcgtctggcttttagagcttgctgccagctttggggagtgtgaaggctgaggaatgacgctctgtgtgtctggctcagccagcaggcacagggctccaagcacggggattccagggcctcaggttgcatctcaagtggcgtaactgagcagtcagctgctggcagtcactctgaacacacgctgctcctcagggcacggcatgtgcctcccaaggcagccagcccattccaaagggtcagagcaaagcacacagtgccctcaatagtctgctcccttattcagccctggcctatggtaacctaagcctaggcaggggctgtgggcaccgcatccctcagctcagctcagcctctaagtgcattgtgctctgtttccacgtgctgctcaccttgttttggggatttctaatctcactcacatccttctatttctctcatggcctgcaggtccccttttactattccaggtgcatcagaagtgacggttcccatgagcataggggctgtgtctctagtgagcttttcccagtaaagtcatattatccatgtcagttccaccttcaaccccaacattccctgactttgtcgttcaactcccttgtcccctacggatccctctttttcacaacttctaagacacttgcagtccacaccttgttagcaagttctccattacatgctgctttgtgctattttccactggtttcctctctgccgtcctccctccagcaagcccctaataaagaagaattttgtttcatccacctctgatattctttgaaggacatgtaggtttcaatgaatgtttgtcgaatgaagaaatgaatacacaatttgagccctgctcccccaaatcttatatataggggcacagagaaacaataatgaacaattacaaagaagcaggaggagtatgtgcaggatatggaggcagcccagaagtccgacgcagtaagtacaggtcctcaggaagcattaggttgctggacaagcaagacatacacaagatccatttctcccacctctgcttgttatccattccacacagacaccaagccaccgttctttccttacaacaggcatcttggcttgacgcaaaaataagaaaaaaatcttaccatgaaaatcacggtgactgcttctgttcaatgctttatagtcttcagggcattctgtgaccaaatcacttgtgtatgccaatgatggatgagatgccttctgcagctctttctacatcaaatcccttgatttgtggaaaaaagcagagatcacaagtgactttcctgagtccccgcaggcaggtcaacatgggactggaaccaggatccaaggagctccacgttatcccacactaaatctcttctgtccagctgcctctccctccccagcctctcctggagttggaatgaactctttccacagtctgcctcaaatgatcggattattggacagcatctttgctttcaggaaaaatgctatggcagccacagtgacacccaacttacctagtgatgacaaattatatgtggcgttccaagctgtacctgggggttttcagggttatttgcacctaattataggccccctctaagactcccacagttgaagtccattacagtaaaactcttccctgattgcattttttttttttttgagacggagtcttgctctgttgcccaggctggagtgcagtggcacagctttggctcactgtaacctccacctcctgggttcaagtgattctcgtgcctcagcctcccaagtgtctgggattagaggtgcacgtcaccatgcctggctaatttttgtatttttagtagagacggagtttcatcatgcaggccaggctggtctcaaactcctgatctcaagtcatccacccacctcggcctcccaaactgctgggattacaggcgtgagccactgcgcccagactctcattggattttattagtaatatagtgacagaagggtgcaaagaaccatgtttccaccattaaagaaatttggggtctgggagcggtggctcacgcctgtaatcccagcactttgggaggccgaggcgggcggatcacgaggtcaggagatcgagaccatcctggctaacacggtgaaaccccgtctctactaaaaatacaaaaaaattagccgggcgtagtggcgggcacccgtagtcccagctacttgggaggctgatgcagaagaatggcgtgaacctgggaggcggagcttgcagtgagccgagatagcgccactacagtctggcctgggcgacggagcgagaccccatctcaaaaaaaaagaaatttgggaaggatcttctcttttagtgtattgattttaataggaaccaattccaagattattcctacgtcagtagaagtataatattagtagtcatggtggtgaagtggtctcttcagaaaaaaagaaaagaagcttgtagctcttgccagttcctgtagtgtaaattctcccaccatggccaattttaagctaccaatgcaatgtcaccgtacacacacagagttggaaagagacttacctagttggctccatgagccaagacaagtggctgccacagccaccacctttactgagattttactacgagataggcaccctttcaggctcattgaatcctagcacttcactatgatttatctataacaatagggaaaataaaaataggtgcttacaggttttgtgacgattgattgaagtcatacacactaactggttgagagcagtgcctggcagatagtgagcattcaataaacagaaacaaccagaattgccattattactgcctgcattgaatcttctcatcagccatgggaagcagatgcccctcccacagccgacaagagcccctccttggtaagcatgtgtgtggctagagcttggaacattgtgcgtggtcttctggcctcctagggagggccacgtcacaattcatcttttgaccctgccccccaatttcccagtcctccctgaggatgacaaagtggagtgctctgggaagacagaagcaacaaaggggaccttttgtgacagaggagagcatttaaaaagagagacacagagggcaaggcaggagtgacctcaaatggccagagctagagccctggggcagcaaaacaggaggcaggtgtggtttagcagcagcgcccattaggacatcccacaggcgaggcctcctacaggggtgtctgccccacctgccccacccctacagcaggtcctgcaaaaccacctgtgagctgtggttgacactgaactgcagggaggatgctaagggtgcactgagctgaaagcaggtgacttcctttccacctggacagtacacataactcattcactcaaaacagaaccttccagttcccctcacctgcccttctccattgcaggcacacattagcgtggtctctgagaaaggaaggagaagatgcccagctgtgttcgctggtatgtgtgtgaggatggaggtgctcatcttggcttataagtaccaagctgtgggcacctttctaccctgaagtttgagtgattctgcagcaatagacgctcaggggaggatagcagaggcatccaacagacaactcctgtggctcacccaggtcagggtgggtacatttcaggctgtcttgtagctgcttctctgaggagctgggttctgctccccaagctcttcacacactctcaaagatggtctctcctgaggccacagacggcatccttgccaaactgcccagggcaggggtacacaatgggggcctgttcccgtggaagccaggaatattccatgagaaagaagcagagaagaaaaaaatgtctaaatatctgtttttgcttcctacacctcacccactcaaaacattaacttcataccaagctcccactgcatcagtgtccagggacttcaggaagcccaggaaggagcagaggaagccgcgtctacaccagctctggcatcatgtcagccccacggcctcagccccaggcttcacgagctttgcattttcttaaacgtttgatggaatcacgtgcaccagctgcaggccaatgatgccaagggccagacatttttgtgttttgcattttttttctattttgctttctctttaagtggaaaacttatatcttcagactgctacattcactggtaaattcaagttttgacccgtcccatcgcgtctgctaccgacaatccaagccatagcccaacttcaacgtgtcagattgcaggaagggttctaacttcaggggaatcgaaggaacaaagatgactagcttttattttactatctccttgttatgaagtttgacttttcagcagggaaatggggcttgttaataataggatcaagaagcatatattccatgcactatgctgggcacctaaaagaaaagagggcaactgtaccccctaaaactgctttcattcttaccaaaaggctcagtagcaatcagaaaaaaaaaaaaaccacttcagaaaggccttgtgtgcttactcttaccagaaattaaaagagatttcaaagctacattaatgaaaatatttgattctggtgcataaatagacagatgcatcaatgagccaaagcagaaagccccaaaagagactggaaaatataaaataatgcataaagcaaatttcacctcattgcaggaaagatggatgattcaataaatattgttggaaaacctggccaatcatagaggaaaaaaaaagtcacactaaatcctccttcatgtctttacactaaaataaattacaggtaaaaaaaatatttaattttttttaagtttcaatgcatcagaaataaacataaggtaatcttttcacataatcctgagagagtagaaagtccttctaatcaagacaaaactcaaaagccatacataaaaatattgataaggttgactatataaatatttataatttcacatataccaaaaatactaaagtgatatcaaaatacaaatgaaaaggtgggggaaatatttgaaagacaaattatgaacaaaggactaatatataaagggtttaatatgaaaacaggactgtgatccacaagtaaaaggccaaggactcatttttttaatgagtaaaacacataaacaggcaattcacatagagagaacaagtgaaagaaatgaaaagaagcagcaaattaaaattggtaaaaatgttttaccgaatacgttaacaaagattaaaaagtttgttggctgcataaatgtcttcttttgagaagtgtctgttcacatccttcacccactttttaatggggttgcttgttttctcttgtaaatttgtttaagttccttgtagattctgggtattagacctttgtcagatggatagattgcaaaaattttctcccattctgtaggttgcctgttcactctgatgatagtttcttgttttgttttgttttgttttttgagacggaatgcaggtcggaatgcagtggcgtgatctcatttcactgcgagctccgcctcccaggttcacgccattctcctgcctcagcctcccaagtagctgggactacaggcgcccaccatgcctggctaattttttttgtatttttagtagagacagggtttcaccgtgttagccaggttggtctctatctcctgaccttgtgatccacccccctcggcctcccaaagtgctgggattacaggcatgagatagtttcttttgctgagcagaagctctttagtttaattagatcccatttgtcaacagtgtgggatgttcccctccctgtgtccaggtgttctcgttgttcaactcccacttacgagtgagaacatgcagtgtttggttttctgttcctgtattagtttgttgaggatgatggtttccagcttcatccatgtcccttcaaaggacatgaactcattctttttttatggctgcatagtgttccatggtgtatatgtgccacattttctttatgcagtctatcattgatgggcatttgggttggttccaagtctttgctattgtaacaaataactaatgcatgcagggcttaaaacctagatggtggttgataggtgcagcaaaccaccatggtacatgtatacatacctatgtaacaaacctgcaagttcagcatatgtatcccggaacttaaagtaaaatttaaaaaaaagtttgataatgcacagtgttgactaagatatatgaaaacaggcattctgaccagctattggggagagtgtaaacgggtgtgatgtttttagagagcaacttgatagcatctgtcatatgagtccatctgcaagatgagtgaattcgcaaaggtctaggattctctgcaacactgtttgcaagggctacagactagaaacaatctcaaagttcctcaagaagaaactggttaaatacattcacacaaccgtatactccaaagtgtttagaagaataagatgattccatatgttctaagagaaacaatctccaagattgctaagtggaaaaagtgggggacagaacaatatgtgtactatataatgtgtgtgcgtgtgtgtgtttggtggtggggtcatacctgtgtattcattcagctaagctttactgagcaaccgctacatgccaggtattgttctaagcacaagggatgcagcagtgaacaaaacagacaaaccagctggctcacgcctgttatcccagcactttgggaggctgaggtgggtggagaacctgaggtgaggagttcgaaaccagcctgaccaacacggtgaaaccccgtctctactaaaaaaatacaaaaagaattagctggctgtggtggcgggtgccggtaatcccagctactcgggaggctgaggcaggagaatcacttgaacccaggaggcggaggttgcagtgagccaagattgcaccgttgctctccagcctgggcaacaagagcaaaactcaaaaaaaaaataaacaaaaaaaaaaagaagaaaacgagaagaaagaaaaagacaaactcctctgccctcgtggagcttattcttttttttttttctttttttgagacggagtctggctctgttgcccaggctggagttgcagtggcatgatctcggctccctgcaagctccgcctcccgggttcacgccgttctcctgcctcagcctctggagtagttaggactacaggcgcccgccaccatgcccggctaattttttggatttttagtagagatggggtttcaccatgttagccaggatggtctcgatcttccgacctcgtgatccaccctcctgcgcctcccaaagtgcttggattacaggcgtgagccaccacgtccagcctatggagcttattttctaatgaagaagagcaacaataagcagtaagtggactctgtgatgtgccgcgtggtgcagagtcatatgaggaaaaataaagatgggagtatgtgaaggaatccagcagcaaaaaagtttctttgaaaaaagcttcaccggaaagcgggtatttgagccaagacttgtaggaagggagagagggcactatgcgctcagatggggaagagagttccagccagaaggaagggaactgctacgattgaagtgagggtgccggggagctggggcgggtgagtaagaaggagaggatgggagaaaaggcccacagaagaggaaggcagaggtccttgtaggggcttgacagactctgacttccacctcgaatgccatgtgacatgatctgacttaaagtttttaaaatatgcagagaagacttccaaagagatgcataccaacccgtgacagtggatgcctctgggcatctagatggatggtggcaggcaggcgggaggtgtgggggaattcctttgcattctattcagtgggctgtttcatttggttctcctcttccccaacctgagtgcatagttccctccttgttttcttgttttataatgctttctcgttttttaaaagagcgtgctatgtgcagtgcaaaataaagaacttcccctgcaaaaggatctttttattcctggatagcttaataatctagggctggttaggatgatgacttagattgggttccccaaaggcagagcctgagaagagggttggaggacatcccaggtgaggagtctatttccgaggtgaacccaggagacactggtagaggagtgaggaagtgagacagagaaggcaaaaagggcaatacggggtgcattcttgagcagattactatttgggtaactgaggcactttcctgctgggaactctgggagactgtgtggagtacacctcagagttatttgctcaagttaaggataaggaagctgggctgtttatccaccaactcatatttgctgttacgagagaagctctgtgggaacttagctccatttcccatccaggggatcagggcaaagctcccaggtggaatatgttgggtgcctggaccaggacgccatgggcaggtgctgaaatggagggcacgtgggctctctgctgcagggtgtgctttgcctttttaaaaatacgtacgatggtttcacctcaagttcttttcaccctactgtccaaaataggccctgctttgaccgggcgtggtggctcatgcctgtaatcctagcactttgggaggccaaggcaggcggattgcctgagctcaggagttcaagaccagcctgggcaacatggtgaaaccctgcctctactaaaaatacaaaaaaattcgccaggcatggtggcatgtgcctgtagttccagctactcgggaggctgaggcacaagaatttcttgaacctgcagggtggaggttgcagtgagctgaaatcacgccactgcactccagcctgggtgacagagtgagactgtctcaaaaaaaaaaaaaaaaaaatagaccctgctctttaattcatgtcacacgaagatggaacaataagaagaaaatggggtgggcttagagctgcacttggggagttgcataaaccagcagtctcttgtacctctcctgtagcccaaccaagaaggccctggaacggggccatgcatgtaaacactatctgtccattctgctctggtgtggggagaaaaagctttgaaaacatgcctttaggaaaatttatggttcactatttttttaagagaagaaattgtagatagcaatgcacttttggattgagccaggatgcctcaccctcccttgcacacccattcatgtcactccacttcttcaagcccagcactaaaatgcctgtctctttcaggaagccatcccagaagaaatccacctgcctccctccaggctaccaggagatgcttagcacacaggccaccaggcatcagcagtgagcctgaaaaatgtgggtgtattgaatccaaatattcaacaaaatcactggggctctctgaccatgtctcatcatcttcaaaatgattggtgagattaaaggatctctgtaaaatgatctcagacaatcaatccttctagtcacttgatctttctatggttttaaagcaactggttttgggagtcgaccatgaactgactcagaaaatgattaccagaagtggggttcaaaaaaagctctgggcagccccgctttgttagaatgagaacaacctttcacgccggtaactttgaaggagagagctctcacttggggatgcaagttcttatgtatacttttaagaattatctgtgagtccttcaaaggcaggccttaaatcctacttgtcttcacctctccatatttaaggttctgtgtcaagctgttgataagccagtattcacattgccaggtcaacaagagaagaaaaccaagcaggctttatcctctgcttatagctttagctgctgtcctgcccaaaaccctacatggctgttcattattctcaggaaaaaggtttgtctttttgttttgttttgctttttaatgtgatgcacattagacctctgcttatcttccagccacaacgtgggtcacccagcccacaagtcctcccacacagggtcctctcagagtgtcctcttcaggtgagctgcttgtgaattacccaagatgcttgtttaaaatgcaaatatctgggccccagtcagatctaccaatcagactctgaaagtgagccccaggaatctgcacttctagcatgtgcataaggcaattcataagaatgctgaagtcactgcttccgctaggccattttgacctccttttaatgtcttgaatgagctgaactccctcctccctgaattagttatctattgctgcatgaaaaattactccaaaatttagcctcttaaaacgacaaacatttgttatgtcatagttaggttaggaattcaggagcagcttggctggtggttctgcctcaggatctctcatgagattgcagagattttggccagggcttcagccctttgaaggggtcacagaatctgtattcaagctcacacctacagctgctgccaggaggcttcagttgttcctccagcatgggcctctccacaggactgctagagtgaaatgtcagcttgtttcccccagagcaagtgatctgaggcagaaagagtgggtgcccactattaaagccaaggtctctttataacctaatcttggatgtgacatcccctcgcttctgccacattcagttcatcagaagtgaatcacgaagttcagcccgcactccagaagaagggaattaagctccacctctggaagggaggggtatcaaataatctatggacaaaatgttagaaatactacacaccggctgagcacggtggctccagcctgtaatcccagccctttgggaggctgaggcaggcggatcacgaggtcaggagatcgagaccatcctggctaacacggtgaaaccccgtctctactaaaaatacaaaaattagccgggcgtggtggcaggcgcctgtagtcccagctactcaggaggctgaggcaggagaatggcgtgaacccaggaagcggagcttgcagtgaaccaagatcgcgccactgcactccagcctgggtgacagagcaagactccatctcaaaaaaaaaaaaaaaaaaaaaaatactacaccacctccacaccttctccaatgctgtttttcctaagtgtaatgtccccctacccccaacacacacacacacagacacagacacacacacacacacacacaggcttgctaggctaaatcttacttgcccttcaggtatgaaattaagcaccactttcttccagagctaccctgtgtggtggcacaggaagtgcaatcgtacagctccagatagtgctattcacctggcagccactgcagatttgtgtgtttattaagaccgttttcagcaggtgactgacaatataaacctcatgtacattcagaacggtctactgttgtaatggtagtatgtaagaggcctcacatcctcagatctgtcccaactccaactaacagggaatcttcaccagcctgaagacagttgaagccccatatcaggaaccccacagcccatcttggttctaacagggcagaattctatggctatttgccaggtgcatgtgtcccggagcacagaggcggcaccatgccctcgtgaaagaagctgggagctctcagcctgcagatgatcaaaagcaagtattgtgggacaggcaggggtgatgatgatgacgcctgcatggggaggccatgctgtctggttaaaaaaaagctgaggcctgagggacagattagcctctctggttgtgtgaacttagggtgttctcttaacataagtcttcctgatctgacagtggttggggcatcaagtaaagaaggtgaacacactgagaataaacacaatccatacaaattgagggcgttgctagggtctgcatatttgcatacccccaaaattcatgtgctaaaatcctaatccccaaggtcatggtactaggaggtggggcctttgggaggtgattaggtcatgagggtggcgcccttatgaaagacattagtgcccttataaaatatgccccaggagcccttttgccccttctgccatgtgaggacacagcaagaagcttccatctatgaaccagaaagcaggctctctccagataccaaatctgctggcattttgatcttggacttcccagactccagaactgtgccaagtctgagggtggggaggcagaaagtaacactagagatctgggacttgaacttgccaaaatcaaatgatcaaatcaaatgaggaagcattgattactatggggcattactcagctattggaaagagtgagttagagctctatccgttgactttgaggatatccatgatgtattgttatatgagagaatcaaaagaaaggtactttgtaagatctcatctttgtaaaaacagtatttttttaaaaaagagaacatttacttaaccatttctactataaagccagggttgtcatgtcacactattccaaagaactccattttcattatggtccatgtgaaattgtgtctccactcccatcattctgaaattgtgcagtgctcagcatgtgcaactgtacaaggaatcctgtaataagacatgcagagacctggaggatgtgggaaaaaaagagtgaggcagtcattacccctgctttgcttcataatttgaaacatgatttatattttgagatcactcaagcaccaggatctctgatcgtcctgtttgtgcattctagaagccaggactcccccaccaccatgcacataggtttctaaagaacctacaggaaaagaagctcaaatatgaggtgcccatacatcccactgcttcaatttcctcaggaatgagccccagaaagccactgagacactcaaggaagcagcatgggaagacgaggggatgagctgcctcaggaagctcatttcagcaatggttggagtggagaaaaagtggaaccagcctgaatacccatcagaaagagaaatggatacatgagctctggcatttctctgcaatccaaaaaatcgaggcaattttacattaacagggagagatgttaagcggaaaaagcaagttgcaagatatgtatagtgatctcattaaaaataactgtgtgtattatgtgtatacatacattaaatatatatgtgtatttgtactgaaaaagacgagtctgaaaggatatatgccaagctgtagacagtggttactccttggggtagatgtcaagggagagaagtttccaccatttacttcagatacgcaacagaagcaagatttgataggtgttgaagtcagaggaactgaccttatgtcaggggttctgaaattttttttaataaaatacataagaataaaaacaaacccattttgttgaaactaaataatcaaagcttttttaaacacagatgtgtgctaagtatactttgggttttctttactaatgcattaaatagcaagatgtagcagcaagtccaacgactaccatcatttcaaagaagaaatgagcagacacaatatttcaagatatctgcaactgtcacgtggtatgaaaatttctgtgattcccagtgccaacaaagtcacaggtattggtaatacttcactgaaggaaatgctcatatccagtgagaggtttaataaaaacaaagctataattttttttcccatccaagtgcaaggactcctggattctatttgtggatgtcttgaaagtccgcgggagccaggttaagaactctgaggatttctgcattctagaaagtcagcattcatttcttggtcaaatcttgcttttcttctgagagggctcactttggagtttatttgtgcggatttatgttttgggggtgtccagagttagtgaagtaacccaaaagctgctgcctttgatgtggatgtaaaacattctattgggtgatatgaaatcggtcttttattgagactgggcctttgctaatttacagaaagatttttcaataaataaagaaataaaggctgcactttcttttttatttttttttaatttttatttatttatttattttgagatggagtctcactctgtcgcccaggctggagtgcaatggcacaatctctgctcactgcaacctccatctcccggggttcaagtgattctcctgcttcagcctcccaagtagctgggattacaagtgcccaccaccacacccagctaatttttgtatttttacatttagtatttcacattagtagagacggggtttcaccatgttggccaggctggtctcgaactcctgacctcaagtgatctgcccgcctcagcctcccaaagtgctgggattacaggtgtgagccaccgtgcccagcctaaggctgcactttcattattttattcagtgtttctggtggtgatggtggtggtcattgtgatggtgatgttgaaggtagaggtggaggtgatggtaatgatggtgatggcagtgatggtggtggtggtcatggtggtagtgctggggttgcaggtggagatggaggtggtggtggtggtgatggtggtaatgaaggtggaggtggaggtgatggtcacagtgatggtggtggtgatggtggtggtagtggtatggtggtgatggtcatggcggtagtgatggggttgcagatgaagatgatgaaggtggtcatttggtggtggtggagatgctatgtgtgttctgtttgaaagctatgggtgattataagtcttaacttcccccatgttctggcagtgggactctaaagaggaccagacaaaagccccctgctctgctaaatcattctgacgctccaaatgcactgtatttcctgactgaacaagtcgtgcaacagaaagtgtactgttggatgttgcagttttcttttccacaccaggaaaactaaactacatctcatggatgaggctgttgttgttctcaggggtaattttgtctatgatcaagaaaagagggaacctatggacagggcaaagtaaggtgcaggacgccccagtacctccaggattaaggaaaaactagacctggattttgagttatgcagatacactgagatccatgttgaagggtgagccggccctcaccagggaacagaaatcacatttaggttgtgatttaggccaccaccctccgcccgccatccaccaccccatccagagtagccacttatggtagcaattgtaatttactctgtttagcttctgatatccccaatccgtcacagcagacatggttggctgtggcgaacctagcagagctgtgctttgggaagctgcagggggaccgaatagctatggtggggaagggcagaacagcagtggcctgggatcctgcagcagctgcttcagggaggagatgggtggccggaggggaccagtggccattagggtggttttgtggaatacgcaagcatttcttagagcttcccagaaagtaggcggaaactcccctttgtcctcaggctggagctcctactcctaatacctgagtattaaagaacatatgctccccctaagtttgacagggtcagcgtcacttgtcaattacacttcaagaaaacctaagttacttgcaacaagcatcatttaattttgattaatttaaatttgattaatttaaaggataatcaatgaagctcaaaaggtagagaagaagggaaaggagggagggaggcaatgggaagaaagaaagttgaagaaaggaaaggaaggaaagaagagtaaaagacagagtgaggagtactatggctataaccaaagaggttggaaggagatagaacgagggcaaggtcacggttgaaatgcaccccacaccgcagtctacagagaggcccccggaaatctggccacgccagtagggagcaggggctgtctgccacagtcaagaaatgagaggcagagctagtccttttgctctggagaactagaaatgtgaggtggggtccagcaggccaggagccagatgctgaaggcttagacctggcacctgccccaggtctggagaggacattgaggaaggcttgaggtctcctttgtagctgcccagctcagccctctaggatagagaggcagtcagggaataagagtcctggaacaaacagtgtacacatgtttgacacttcctctgtgctgtcactatacagggctacagacagagatgccctaacctaaagcctgactgaaccaggggtcgctccatggcgctacagaaacagacctggatgtaggggctgaatataacccgaaagcagctttgcaaagttttaaaaacctacgcagccactcacattcaacttggccaaaaattcgccatgacctcactcctttttatgagcagctgtcctgatactaatcctgcctctttccataatccctctttcatgagactgagagaacaacacgtcatgagcctaaagcaaatacactcacagagccctgcacttcgtaactcgcatcaccactgcaatgcgatcatgcgcttgtctaatgctccactgccagaacgtaagcttgattgcgtctcctgtgtccacggctggggccctggcacaggcagcactgggtgcatatttgttggatgcctgttggcatgctgcaaacatgggaacaaggagcaagctgggtctgggaaattacgtcccttctgatgaaggctaaagaaaaggaaatctacttggaattccatcagataggtatggattggtcatttaaaagaatagaatcactatatgttaagttttttgaacttgtgcctcccgtcccttctctctctctaatatcccgtaaggaagggtacatgaaaggaacttactgaagagttcactcaaatcatactcttgggtctagacggaaccttcataaccttcatagcagagctgcctactcagtgcttcaaactttacaaaaagccaagtggtttttccagcctgtggatatgatgaaagaaaccacctcttcccagtgcactttagattgggtgctaagccttgttctcacaaatcacttgctcaataaatacttgagcaccgactctgtgccaggccgttgcagggctctggaaatataacggcaaacacagctgacctcacccaggtctcatgggacctccagcctcaccatcctacctctgctggtccagggacacacggtaaactggccacatgaagaggggtctccaacggggctgcttcacagtagaggagccatggctgaaactggggtcagcagctactggacaaacacatctgctctacttgagaacaccagcagggttgtcatgggtaacaccaatgaagaggagatctgaatttaggggaagctgcctgcacttggaattgagaggcccaagttccaatctcgaaagggctctcctccttccataattatctaatcaactagggagcataggcctaagcctatgggagcttaaacaagctccaaaatgcaaaaatgtgagcaagagaccttggcacattgaaggccacctttcttccttccacaagttagaacttctggaactaactttgctctccataaaaaccctccccattggcagacacacagaaacaaccccaagggtcaggtttttaacttgcctgaaatcctgtggcctctcacatccctttgtctaccaaaaataatggaatgctccaggtggctgaccaattgaatctagaaaggaagtgaattgataccatgagctttgctgggcccccagcaatagaagcttcctagaaaggccatagatggggttggaatttccattggccctggaatatagggcctgggagaaaagacaaggtctcagcaccaagtccaaggtcttttccatgccatctgctgccctgagcagtgtgctaacaagagtgggcacctgtatattctggcctgccccataaagaaatcagataattgtcaggctcaaggcagagaatatggggtggcttcaagccccacctaacatgaggtattccttcatctccatctggccctgcccagcatgcccccatgttcccacacacatgctcagagctggggacaggcccagcctagccatgccttacagatctaggacactgttgtggggtttgcaagcaccacagtagctggctgaagccttgggttcctggtgagagacagagggaaggtgatgtggggatgtgtagtgaaagaagaagacagaggttttcctgattgcttgacaaacataagcccagcccttagcttcagcccaggctctgacaacatcagatcacaataaacctcaggttgtgtttactccccttccctggctctacctcccctggtttctcaatctgtctactcttatctggcactgataatgtgtgggctctgaaaatgtgccctttggtctaaaagtgtggggattccaaaaagcctccaagaatgaatgactcaatcaaggctgaaaagagccacattgtccagatgtgtacatctgcttggacccagctcgcaaagcactttaaccatcttttcacaaccgctgtccacatggagtgaggctgcagggccggcattcctactcctagattctcatcttcctggatgcatcgtcagtccctggttgggattccaccaccgagagctgcgctgctccatgtgactcctccactgcctctgaagaccccctttaggacccaaggatcaaaatccctacctcagggtgcccgtcttgttttccctgtcctaaaaaaaaaaaaaaaaaaaaagactaagggactggtcatactgctctggtctcattccaaagtggctcttacacttgctgttgataaactcgataactgctccttgtttaggtctcacccgacctctattccagttagagggctcctgggccacccccaaatatctggcttgcccacatctgcactgcgcctttgtttatgcagttacctccttgaacactttcctgcagctttttttttttttttttttttttttgacacagtttcggtcttgttgcccaggctctagagtgcaatggcgcgatcttggctcactgcaacctccacctcccgggttcaagtgattctcctgcctcagcctgctgagtagctgggattacaggcacccaacaccatgcctggctaattttttctgtattttagtagagacggtgtttcaccatgttggccaggctggtgtcaaactcctcacctcaggtgattcatccatctcagcctcccaaaatgctgggattacaggtgtgagccaccgtgcccagcctcctgcagcctcttatctgtcatgcagactaatctcctttaagacatgctcccaggccactgctaaaaaggctgcagaatgtggaactatttgatgtcctaatagcccctgccaacatgaaaatgaccagcaggctcagtcatgttgccgaggttaaacttcaactgtttaaacgccaaccgtggaatttgcaaatgggtaaataccatactctgtacaaggagccaaagaatctgctcaaagcagctgctcaatgtgtgtcagacggggccttagttacagagcaacacagacggactaacaaaatacatattctgatgtttcatgaacctactacgtcagggagactaattgaaacagctctcctgccaagcagacaattccatatgcagaggagataaataaaaagaggctgcgggctgtggaacattagagaaagccaggtccctctgagagatgtaagttaaatatgtttagtgtaacctgagataccccgggcctctccagcttggacagaccgatgaggttacattaggaataacctgcattccactccatgccctggctgctcgtgatgaacttcaggccttagcaagggctccatgtctatttctgggagtgccaaggatgtctcttggttcctcatgagcaaagctggtcctgccaaccacccattgggtctaccagacctggctgtttcttgtccatacccagagcggtgggaccttcttgttgatgcattgtgaagtcaagatctcgccccactttttatgtgtaccccagggccttccaggatttttagtgaaagagctgtttgagagtttgaatcattgatcgccacgcacatggcactcaggaagagctgaaccaagggacaaatctgagcatcagacatggcaggtcatcctcctcccccaggatcagcctcctcccccagtgaccaaggcttcattactggatccagctgcttcttctctggcggaattcatatagtcatggctggttaagtctcggtgttagccagacctgcgagtcccagctcgggcttaagcagagttccccattcaaaggaattagactctttttctttgttaaattgccttaggaggtaatgcttctggaccacagtcacggaacacagacaatttctaccacaacatcagatgttaatgatatcctaggctcatgcttgtgttgttataataggctgagaattaaattaatttaaacaatgatatctatagaaaaattattttgccaggtgcggtggctcatgcctgtaaaccccaacactttgagaggccaaggcgggcagatcacctgaggtcaggagttcaagaccagcctgaccaacatggggaaaccccatctctactaaaaacacaaaaattagccaggcctggtggcgggtgcctgtaatcccagctactcaggaggctgaggcagaagaattcttgaaccttggcagtggaggttgcaatgagcagaggttgtgccattgccctcctgcctgggtgacagagcaagactgtgtctcaaaaaaaaaaaaaaaaaaaaaaacccacacacagaaaaattattttaatttatagagtgcatacttttctaaaaactattaaatgcttagaaattttaaaaaaccaactgtgcaaccttcagtaagttaccataccactctgcccttgaaggtattaaaagaaataaccccaaattccaataatctctagcactcaatgagtctctgtaatccatactttcccaaatataacctagaaagaaacacccataaaagaacaaaagagataaaaaaattattggaggaatttattgcctgcctccatgtctataaacgttccatggacacaaaatacaatcattcaaattccctggaaaccacctatatttttcgaagaattcattctggccaacagttgggaaccaataacaggtctagagctcctaatttaggcagctgtcccaacataaaagcacaagagccagaggtgagttctccaaagctgcacctgtgtctgcaaacgtttacacaagacccttgaatggagaacatgccttgtagggcaaattcaacttttccaaatgacactgctataagttactacatctcatcctctacatctctgtgagggatgatggattagtattaactgtcttgcaaatacacatacagaaactcaggtaaggtcagccttactcagtagataaaccccaaacatgaaaccagctgggtcagcctgtcataattggatccctcttgcatgtaaagacaaaggttgtctgcttggagatggagaagagttcagcatagctcgctttggggccaactcagagcaagggtgaaccaatcctagctgtcctctgacaaataacagctggagtcctgccaggagctcctcccccaagcacttggttccacaaggcaaaccccagagaagtacaggggaaaagagctctccatttctcagcaggggacaccctggtccccactgccactttgtttgccctccaagggaaaaacctctcaataccaggtccaggagcagctggatgggatcactcagaacccggccgagagctaattccctcttggcttcaaaatccatcctatgcttggagatgctggggctgggattctacaaaccacattctggctttgtgccctgataggctcagcccccagggggagctagaaggaatctgctaggctaaaggaggaagtaggaagtggccccttgctcacttcctgtttgcttcctgttcactttctatcagcttcctgtcccttgccagacaggttgctaaccctagcagtgctttttcttcacccaggcagtggcaactcctcccagaaacatttcaatgcagtttttggtttttccaacactcacaaaagcagcctcatgggggtcccctcagagacaccaacaaaacatctcccctattcagaggagggggcaccatccccacaggactctcctcagagctcagagataccagctgcattgagtggcatccccactcccccacctcagaagtctgagattcagccccatgtcccttctccaagcaaccacctttcaatgagtccagcatcttccccttgttcccaagcctcaagtgtgatgcctgcttcctgtggtgctacctccatggatacctttgtattcccttcctgccctttactgtcacctggttaatcattctttatattatctctaataaaagagcttgtgtgatttctgtctcctgcctggacccagacaaatcacccacattttggtcctgagaatctgcagcagagactagagccagggactgcccaaacccaccagagagcagtgtgggaggggacacactcacccacccacctacagcttgcattctgatctggtttctcttagccaagctccgcatgagcaagagcaagttcagatttaaaggacactgtcaagtgagtggtaaatggagcttaacttttgtacgttcttggggaatggctgcagggacccctggctaaaacatttgcatgtttctccttgttggtcagtagcgaactgtagggagcatcctcatcataggcttgcgggcaaagatgatcttgttatagttttcagttggacagtctctggaatccgcatgtaagtgtgtgggttctgggatcatggtaggagccatggccaataccgaataagcgccccacattgataacgtggattctgacagcgtgtccctgaacacagctttgccagaagacttggaagacttcctccttttcggctgaatgacgctggaaggtttattctgccttgatgcccagggtctttcctcgagggcacgcatgcattccagttctctagttttgcttttctcaatgagtcttttcactgtctgagaggtataggtgacataggccggccaggggtcatgtttttcaagtagcttccggggaagtccagtgttttctgtgagtcctaccaacaaagagaaatgcaggccatttagaggcagtcacatgcaatagcttgattcttcaaaaaatgggaaggcattggaaccagattttgaagtcctccctattttgcaccccttgtattcagtaggaataaaatccaattcaaagtgggggaacagaacgacatcctagaaagtctatcaattaaacaacgaaagaatggtaaggagcaagagacagagtcaaacagatctgattgattttaaatatttgcataacctcaaattgttttacccctgaacttctattttttcaccaataaaaatggttagtctaaggcctgagaactaaagaaagtaatatatttcaagggcttggaacagtacacttagtgcttgaaagcatgggttctgtacttgtctgctccaaattcctactctaccctcttcatagctgtgaaccttgaacaagtttcttaaccttgctaaacttcaagtgcttaatctgtaaaatggtgattagaataagacaaagttcatggaactttcttgtggattaaagataacttatgttaagcttttagcacagtgactaaaaccttcggctatgtctcccagcctaaactctttcatttacttctagttacaccttataaggtaggtattctcccatttaatagaggacgaaactgaggctgactagcttgcacgactaacaagtggtgggtttgaactcaagcttaacaaggctcaaaaaaaccaaagcttttcactatggttgctggccagaagtttggggtgtttgccgaggggggtgggtgttgctagaaattcaacgcattagtttatcaagcagcctgttcctttacagatccaaaatcatgggcatgtcagtccttcccatctttcattagcaacgtcactctatttagcagaaatgattcaatttctctcctgcagctgctaccttcctctgtgttcttatgtggtgcattctttccctaattctatatttctttggtcatttcaactggagttttgcagggaggagagttaaaagagtcatcttgccatctccaaattgaatgcagttaaaaaaaaaaatgccgtaaatggggataatcaagtgaagtgtaggtcgtatagttattcccacgctgcctcgtggctgtccaggagctggagcttgtctggggacagatctgtcagtaaagaatgtgctgtagaaggattccatctccctgtaaaagtcatgtgtgacattacctctcactagaaacttcccagcaaggcctccaagcacagactgttcacccttgcctcctccaagcaaatgtaagatcttgtgggatagggcatttgcatggatctggcagagtccaaattcaaacgcctggagcaaaatgagcagcaaccccgttccatctcctgaacatgctgtgttctctgccaccataacaagagtggctgcccgcactattcacaatagcaaagacttggaaccaacccaaatgtccaacaatgatagactggattaagaaaatgtggcacatacacaccatggaatactatgcagccataaaaaatgatgagttcatgtcctttgtagggacatggatgaagctggaaaccatcatcctcagcaaactatcacaaggacaaaaaaccaaacaccgttatgttctcactcctaggtgggaattgaacaatgagaacacttggacacaggaaggggaacatcacacactggggcctgtttgtggtggggagaggggggagggatagcattaggagatatacctaatgtaaatgatgagttaatgggtgcagcacaccaacatgtcacatgtatacatatgtaacaaacctgcacgttgtgcacatgtaccctagaactttaagtataataaaaatatatattaaaaaaaaaaaagagtggccgcccagtggcctcttcccactgcgaatcctccaaccctagacggccccagtgcaggagcttccactggtaacactcccaaccctaccttcttctttcttcatccttcttgcatccatcttctttttaatatttactgatttcttaacatcacaggttcagattcctatgggaaaatacacttgttagccagagcctcctcaaactggaaagcaattagtagccaccctgggtgggggtggttctaagtcctatatggtcactgcatgaggctaagatgactccaccccctgagaagaggacatgttttttgtggagctggagacaggccaagtgagccccgcaaaggcctgcaggcatggccttgctcaagagctgtagactgtcatgatagtctctgggtgttctgctttccagtctcctaactttaaaggagagaggctgggtaggctgggggctgtgtggaggctggtccacagaggggaagtgaaaaaaaaaagtccccgtttcaaaacctttctatctcctctaccagagtccaagagtggtcacattactacaagcacgacatccaacctgcacttctcagcctggaatgacagaaggtagcagagatgggcagtggccaggagtcagctaccagggccccaagcccaggctgaaacatggaagtctaatgctctatgcaaccatgcaggggggaaatctgatggaaaccatagtgtagtggttctcaaacttgaggctgcatccacctggagagcttgttaaagcccagattgctgagcccacctccagaactgctgatttagcaaccgctgttttaagccaaaagggggaaagaaaaaaaaactactggagatttgtaaggttatattattaactacctagagacaagaaatgagtccaggagatctttttggttcctttccagctctaagacacatgcgtatgcctaagagttcattacatttctatattcgattttgccatctctttggcctttaagcacttaaaagtgccatgaagcatttctactatcacctgcaaaagcccattgagaaagagtctcagataattctgaacagctcccagatgatgctggtgcttttggtctggcgatcacactttgagaaccatgggtcgaaggcagtgcttctcaaattttaccaagtactagaatcacctggagaccttgtgcaaccacagacacccaggtcccaccttagagattctgattcagtaggtctgttttgaggacctgagaatctgcatctctaagtaactcctaaatgatactgatgttgctggcctgtggttcatactctgcgtagccctggtttagactgagtagtgggtgttaagccttttttatcagctgccacgtacgtgagggctgactcatttctgcatggaacactcctccgagataagcagttcccaggtttttcatccccctttttccctaatcaaggaactattgtggaatggtagtgagtgtgtcattgacagggtcaactttaaattccactatttttatagagtaaattattcacacattccagcattttattataacacatctaacaaaggatggcatcccggagattcattcatactcccaaaaaaatgctctttttgtcaaacctatttagagacagatcttacagagtccctgctgtgggtatcagtgccaatcttccacagcagtgcagttctagaagaattcacaatgtcattattctgaggctagggaagaaataatgctcaaatagtcatctaacgtagagaaagtttcatgtcatcatttttttttaattgtaaggtaaagcatcttagttctccttctaagacctaccataaggcttcagaatctaaagtcacccattccaagtcccccataacacagcacatgacacgcaagtggccacccaacttgggcctgtccacctctagtgaaaatagaactctttacttcttccatattttagcattgttagaaatttcttggctgggcgcggtagctcatgcctgtaatcccagcactttgggagaccacgacgggcggatcacctgaggttgggagttcgagatcagcctggctaacatggtgaaaccctgtctctactaaatatacaaaattagctgggcgtggtgatgcatgcctgtaatcccagctgctcaggaggctgaggcagaagagtcacttgaacccaggaggcggaggttgcagtgaaccgggatcgtgccactgcactccagcctgggcaaaggagtgagactccgtctccaagaaaaaaaaaaaaaagaaagaaagaaatttttcttcatcttctcatctgtaaataggatgccagatggtggaaatatgtttcagctggcagtatttggagggattgggagtcattcctttcatcattgcttctaagtttctagttgatgaaccctgaagcctcaggaaagcccagtcttacaaacatttgtttccagacttgtgtgcatctgtgtgacccaccatcctgctcagagcctctggccaggactcacctgacccctacagctgtgccgtgtggctgataggacaagtctacgaatggtgggtttttctcgtacctgctgaagcaggaactaggaaacgataaaaagaaccaagggagggagtgtttgagactgcctcaaaactcatggggaggacttgtttgtttgaaaataacaggagacaaatagttgacattaagtctgaagagaagctgtgggcttttataatttccttcaattccagcacaaaggttccattttgtgtccctgtaaatgaaatgcaaaccagcagtctacagacagaaacagcattgacgggaggggcaggaggcagagcgttgaagcggctttcttgtttttcctacagacacaaagcccaagttcagactactgggctttcagagccagctccccactcccccgctcaatctctcatcccaccattttcagaatctagtctgacagactaggtttggcctaaatcattcaattacctggaacgtgaaacaatcaaccttgatcaccttccttaacttcttaggacctcagttgtcacttacaaaatgaggaagaggatgaactcctgtcccagaagacacagttctgtaatttctttttttctttcttttttttttttttagagacagggcctcactctgtcactcaggctggagtgtagtggcacgatcgtagctcaccgcagccttgaactcctgggctcaagcaatcctcctgccttcacctcctgggtagctgggactacaggcacacaccaccatagctggataattttttttttttttttttttagtagagacaggggtctcgctattttgcctgatctcaagttcctgggcccaagcgatcctcccacctctgcgtcccaaagtgccgggattataggtgtgaatcataacacctagcccacagttgttttaaaaatgtctggtaattgctttctttgccatgtctgctgcgagaatgaagaccgttctcagcaatcagactgctaacattctagaaaatgtcaacattactctgaagggacacacagttatcgtgaagggccccagagggacttcaatcacatcagtgtagaacccagtcttctcggacagaaaacaaaaaaggctccgggttgacaaagggtggggtaacggaaaggaactgctaccgtttggactattttactcatgtacagaacatgatcaagggtgtcacactgggcttccactacaagttgaggtctgtgtatgctcacttccccatcaatgttgttatccaggagaatgggtctcctgtcgaaatccaaaatttcttgggtgaaaaatacatccacagggtttggatgagaccaagtgttgcctgttcagtatctcaaacccagaaagatgaaggaaacaacattgagcttgtttcaaattcagcgactttgattcagcaagccacaacagttaaaaacaaggcaatcaggaaatttttggatggtatatatgtctctgaaaaaggaactgttcagcaggccgatgaataagatctaagagatgtccagctacagaaacaagatgccggatgattcctaagacctacttgtgatatttaaaagatgcaataaaagacctattgatttggaaaaaaaatgtctggaaattaaaatgcttctaaacccagtggtccccaaactttgcagcacattggaattactagggatcttggaaaaatacaaatgtaggtgcccactcccaacatcgtgatttgattggaatgggatgcagtacaggcactggaattaaaagtgtcccagacaatttctctgtgcagcaaaatttgggaactgctgttctagaatctaaaacaaaaacaaattgaagatttataaaatattattattaactacttagaaacagaaaaagaaccgggcgcggtggctcacactgtaatcccagcactttaggaggccaaggtgagtggatcacttgaggccaggagttcgaggccagtctggccagcatgacgaaaccccgtctctactaaaaatataaaaattagccaagcgcagagagagagagagagagagagagagagagaggtccagaagatctttttagtccctttccagtcctaagacacatgctttcactcaagaatccctgattatagtcagcactgcatctcaagggcctttaaacatttaaaagggccatgaagtatttccacaaccaccacctgccaataccaaaattgacttagatcaaagaagaagcagtggctttaaagtacagagctaaggaaactgtggccgccatgggactctcatgcaaatctaatgatctcaccctctctggccgcaagctgcatccttatctcaggaaaccatcttgcaaaaggattttacgggttccaggcaggattgatggattagtgctctggcacaaatcgaccccactcagactttttgccctactaaggctgtgaaagtagttccatttacatagtcatgatgagtggattattatctcaatctagtgtttcctaaactgtgtcccacagaatgcaagaatctctcctcaagatgttaataggtattacttaaagaaaaagaaggggcccatggcaaaagctgccctataaagccatacagattgttcaacccaggagtcgccacatcttctaaatctgcaagatttcaggcctgtcctcagtcaactaagttagaaaaaaaatgccatgttaaaaaaattcctttggagcaggattttcagagtctgatatatgttaacttgttctgtaattctccaaaaggaagactgaatatgcagcatcccctaatctcatttgaccaaggaatcactcattcattcattcatttaatgcgtgggtcatctcatggaactagcaaccagtgaaaaaatgttcttctcctgcccttgttttggaattgcaagcctcagagaatgttatggagtaagaggatagaatgatgaacttgctcagggtataacagggtcttcaatgaatcaccttccctgaaatcagctgcagagtccccaaaactgtccctatgcagaagaaaaagctccactggaaacaagacctgtgttcactctgttcagcctctttcttctcttctctgctccaatctgcaaggcttcttttgtttgtctcacctcccacttttcttcctgagccatccctaagtgtcttgcctggccccagaaggagaatcacattttctcaaacaggagcctgatgcaaaccctcatttcacctctgcattttatcctctttgaccttccatctcctccctgccctctgcttttttctttttttccttccctctagccactcctcatttatgtttggctaaagaggaagctaccactaaagccagaagtgtcttgaaaagcttatctctgagatctggaaagatgctcctgagcaaggatccacttagcagaacttgcggtttccatgctgatctccacccgaatgggccgacaagagacccacaaaactgcccatctcacaggaccagcacatgtgctgactccctgaacttcaaacagaaacgctgggaagcaccgagtgcacacctacggattctcagtggcgcccccttctgactctctccacttctttaccccgcccctatcccatggaaactgtcaccattgccccacctctaacaaatgggttctgcggggtgcacacaagaagatgaccatttcttgtgcctttagtgacacagacactggggacccttgggaatcgtagaaatgttaaggcaaagggcaatgggagtggggaggggcgaattggtctttcgggaaagaaggcatctctctccctctccctatgcaataatttgctggacacgtcttcctctctagcgcctctccccagaaacgaacacacacacaaaggagagaaacaagtccattaccgcactatctttaaaaagtcacgttgcatacagtgggccatttggtagtgttagcatgttcttatacagaccgtgcctctttctggtggatcagctgtctctaaccacatcagggtggggaggtgggagtctgatcagaattgctcatcttctaacacagacttggcattactgattcatcacttatgatgggaaggaggggatatgttgcttcttgataatgcttctatactttattttctgtaacgattatatgtgtacgttgagggcattttattttccaatggtgaaaacgcagttcaagtacctatggccattcaacatattcattcatgcacacatgcacacattcaaaaaacctatcctgagctccaaacattactcttctaagagggacaggtcctgcactcacccaggacccactgtggattttccacatttgcctcttactttgggatctacccttctcaatgtcaagggtccgcaatccaggtttcccgtgctgataaatccagactaatcattgctatctgtgttacgagaaacaaaagcagaggcctcccagtacataggacaatacatgttccatcaaccactctgcagtcaggtactgactaagcatctcatacatcaggcaggcactgagtcttggttcaaggagctcacagccccatgaggaagacagaccaccagtttcctaattcaacctgggtggggaggagtgtcaagaaggaggttcaagaagagaaaatggttatgctggatctcaaagggcaaaggaaatgatgggcagtgggcatggtttaaatgccagcctcattgcttccaaatcctgagtgaagtgcttccccactcgggatccatgttcttcttccagcatgcagataatataggcagtttccaaacagtgtgttttctgcatgtgaattataatgctgaattggctgaagaaacactttataaattcactgcgggaagaagcattaggcactgtatacttatcaggtacaaccatgaatctgaattttatatttatccaaggaatattcaattacaaatattaaattcccactttaagatgacattggaaggcccattaagcataaaacacatgtggtcattatctattgatctattatctacagatcaagttccaaatttaaaaatagaatttccagaactagccaagcaggcataatcagaggagagcttttcaacctttttcttccatggacatttttggggtaggcttgtacactggcagactggacaagtaagaaagatacggagaaacaagcagcaagaaatagccctacaaactcatattcaggaaagcaaacatgaaaggctttaagcaatttgtgctcagagaccctctctctgcctgacagctcctgagcagtgtgactattaaaatgtgttgcctcataatatctaatcaatcagaaaaaggaagtcctgctccgttgaaacaatagggacattgtgaacctggagaacacttcagggaaacagcccggcatttcccaggactgcgctcaatcaatgggccaagccaccccttttcaaacgctcaaagcactaggaatccaggccagtgttgttttgaagaaggtgacttgcatttgagattttacctagaagaagccccagtctccacttctaaggaactgcacatcctccaaatatcccagcccatagcatgaccatgcagaaaacactttcctaacccttccaggaagggaatcactcatgtgctctcagaggaaggtgaaagtgactgtattataaatagtgtgtgtcacaattacattgagaaattgccagaaagcaaaaggtgtagggctttacttcaggcctcacgtaaactgatgaccttgcattcaaaatctgaaaagctgagggtaagaagctgaaatgtggagacacacaccctctctcccttctgccgcagacacccctgggactttctgccaagagaactttgtcaggtcatcatcaggagacgcgctctctctcctgggcctttgcaggcctctcaaggaaaggttgttccggagcctggaggcagtcactttccttccccactactgccatcctcaaaccattttccttccttcctcctcctctgaagcttgtgcccccaggctacaccaccacctcacctgcccggttgctgccagctcctgagcgctgtcctctgcccctcagtccctgacaacttgagccccaggcacactgtcctcctttgcgctgttccctgtcatcaccgtggcttcttcattgtctcctgaatgatctgtgcagacctccagcccagcagtccttgacctgctcatttccaatcaccaggtcttcctctcagtctccaccacccgtgcctctgtgatcaggccactgttcttatcatccccaataacgatgctacatccaaaatctaagctgcaagcatctcactcttatttcacacatatttgcatggcaaagccttaataccagttcaatccacctgtggggctcttttgggtgctgtcatctcagcaactaaacttggtgagaggaaaacgccactgtgccgattggtcccacgtggagtaacagctaacatttctatgccgtgtggtgtgaccagggcacacgctaagtgtattacctatagtgactaattaaatcctaacaaaacccatatgcattaggtactattgtattaaccccatttcacaggcaagtaaactggagcctgtagggacattaagcagcctgtccaaggtcacacaacaattaggtgacaaaaaacaggatttgccctcaggcagtctagctgcagaatccttttctttataattccacacacttgctcctctatctccaagtcaatcaacagaggtagtccaaccaacacttctcccttcctactcttttcacttttccactccccaagcaactctttctttttttaatattatatttattttagattcaagggtccgtgtgcctgtttgttacgtgggtatatcgtgtcatggtgggcttgggatcctggtgaacccatcacccaaaatattgaactttgtacccaacaggtaattgttccaccctcaccctcctctcatcctcctcccttttggagtccacagtgtctgttatcttcacctttatgtccatgtgtacacatcgtttacctcccagtcataagtgagaacatgtgatattttattttctgcttctgggttagtttacttagaataatggcttccagctccatctatattgctgcaaaggacagtctttcattctttctcatggctgcatagtattccatggcatatatatgccacatttttcttatccagtcaaccattggtggacacttaggttgattccatgactgctattatgaatagtgctgggataaacatatgagtgcaggtgtctttttgataaaatgatttatattccttcaggtagattcccagtagtggaactgttgtgtccaatggtagttctatgtttagttctttaagaaattttcatacttttttcaatagaagttaaatattttatattcccaccaagcaactatttcaaacctcctcttcacctccttctccttccattgtaggttgtctttgtcttgcccggctttgagaaaaatccaagaatccatcaagaactccctcatctcccaccatcactcgtaccaactctccaccataagctcccctgcactatgccttccttcccactactatgaatgaggcatctgtattcctgtcaaagaacacctctccacttgcagctcaggcctctcaccctccaccttccaaaatgcaatggtcatggatagagttgagcactcactctcacattcttgaaatgttctcccacctggtttccatgatgccacaggagtggaatcccaccatcactcagcaagctccttctgtctccattgaggatttctagttcccttctttttttttttttatttccacacatccccaaagtgatggcaatcagttttgtggctctacatctcatcaatttgccacatctaactagactgacttctttcccaaagtccaaatacatatatccaactgccaatatactacatctttatttgtatatctaataacctctcaaacttttcatggttcaaacaaactcttgaccttactccataaaatgttcctctctggtctcttccatctcagaaagaggcatcatcattcatcgaattgcccagttcaaacatctaacatctctttcttcttcattcaatatctccagcccattatcctccccaaacccagcatgatttaacttctctacaccaccagcctcctctaagacatcaacatctactaactgaactactgaacacctgctactggtctccctgcttccactcttgttcccctatgatatgatttggctatgtccccacccaaatctcaacttgaatcgtagctcccataatccccacgtgttgtgggagggacctggtgggaggtaactgaatcatgggggtgggtttttcccgtgctgttcttatgatagtgaataagtcttacaagatctgatggttttataaagggcagttcccctgcacatgctgtcttgcctgctgccatgtaagacgtgctttgcttctccttcaccttccgccatgaatgtggagacctccccagccatgtggaactgtgaatccattaaacctctttcctttataaattacccagtctcgggtatttcttcatagcagtatgaaaatggactaacacaccctacaactccttctccaaagaggacccagagtgattatttttaaacatgatcagattaaatcatccccctgcctaacattcccccctccatttagaagccaatgccagttccttatgttggcctgcaaatcctctttgatctggcccctgcctccccacaagccttggccagagcagctccccacatcacccactgtgcccggccacactggccttgcctctcttctttaaaaacatcaagcttgttcccacctcagggtccttccccagctactgcctctgcctgggatgcatgtgtccctgatcttcacatgggttgttcctgcttagaagtcaggattcagcctaaatgtcaactcctcagccttccctgactatgtaacatcaccaccagtcactatcacatctcctattttaatactctgtctaacactatccctgcctgacatttcttatgatttactcatttattttctcttaaccaactagactataagccacatgacagcgatgatctcatccatcacattcattgctctgtccccaggctcttgggtcaaaatcatcagataaatggacgttactgcaattgccataagcaacttctcctggaatccccagggatcgctggaaatccaaatatccagcagctgcacacttgtatgggacacaaatgaaaaacacagactggctcacttggcagtagccactactagagaaggtaaaatggcaaaaggtgggacgttatcctgaaaaatatgacaaacaaataggattaagggaaaggcctgggttcaaatcctagcactgctctttactgcttttaagtgggcaaatcccttgccctatctctctctgagccttaaagttttcccccatccataaaatgggaatgatacatgtcccagtaggtttattgtgaagattgagtgcagcattgcagttgcctgttaaggagcaagaattcaagcacatggacccgtgacagtccaggattcacactttgttgaaagaagaaatgaaaccttgtctaacatgaaaaagtccatgggacctaaatgtaccaaattctaactcaagctctactctgctttcccttcgaaactccatttctagtctcaccttgtccaatatgtgcttttaccagggccaggtgtcatcaccgccaaatatggctccagggatatcttctgtatgttgttaacggatgttagctgctctttcaaatgcatggagttgcctccctcataatgattataaattcacacacatggcccctcctctatacacccttcatatctccttcccttccaggacggctccagtgatacttcttttgagaggctggcccaggcctctaggtgaaatagacaggccctcctctctgctcccaagtatcttatctgaaccttatctatcaaggccgtctatcccattatgtgttatttagttgggatgtgtctctctctctttctctttctctttctctctctccctctctctccttaaattgtgtttttaaggctcagaagtgaaatccttacattccaagcaactcttggcccactggaaggatagactgtggtcaaaacccaaggccagatttgcttaacttgttctgatatcttgccttcctcttctcccagctgaaaactctctcttaaagttcctggtgcagctcatttcactgggttcctgagaaacacagaatgaggaaggttaactggcaacattttaatataatgtaactaagatgaatgatttgggagtggagggagaattgacacttaaatacataaaaaattgttgcctataattaaaaattaaatagcaattgtccattccccagacgtcacaaaagaggcctcttgaaattgggcagaaacctttaattattcatttcaaatgagtctttctaggcacaaagataccccaatagtatacaatgaaacataactatccacatagaaaatatgtgtgggtaacatgccaggaaatcctgaagttctgacaaaagaagtttttgttgagtcagaaatccaattaaacaaaaagggttttaatgtgtcttcttggcatggtggagggatgtgtcaaatacttttaaaatccgggaacgggcccttcatggagcgtgttctgtggcatcctctccccaacaaaggcctggcctttaaaaaccaccctcgtgcagcattgcagaaaaaccaccctctctttactgttctagtgaggttctgcaatattattgtgtatggatttcagtatctgaagacggcaattgataggagaattcaccaaagttcccaaaacagtaaaactgcgtattaaacaattgttttggggaaagtgtagcatggaattcagagcacgagttcaagacaggtcagtgacttagctgcgtgaccaggaacaaggaacaagacagttaaaattcagaagcctccgtgttcttatctgtaaaacagaggcagtaagagaaactatccttggagtgccatgaggatttcatgagataattcatatacagcactgggcagagggcacagggcacaggcacatggtaagagcctattggctggactgttatcatcattaatatgcaggatggcaatgtctgctgcaatgccaaaacaatgcagtccaatgttcaggctggagaaattagtaccaagacacatcttgccaaaactgagtcactacgttgaagatcagggaagggactgaagtcatgggaggtcagaagacatgctcaggggacccttcaacacaactgctgccacagtgctgtccctacatctcacccatccctccccagccacactacttttcacatcccaagagtcctgtttataccatctgctcaccaaaaggcactctgtagagctcatcccccagcccaggtgggtcccaggcatctaggcccacctgcagccacatacatacacatgttaaccgagggatgtttccagccaacaggcagcaatacacacaggtgcacatatatacacagccctgagcagaacatccgtatagtcactggcatgagaaagagtctacgagccacacacacatgcttgcatgaatgtgtacacacacaggcacatgcatacacatacaggcacactcctgtgtaactccctaagtcaccagccatgtccgctctccctcaccccagctttgacatcccttgtcccagctgagttctatttctcttctcagatcattgcagccctggtgtagaatgacttaaggagcaaaactgagccaagaagtctcgccagattcctactggaagtaatctggagacttagatctgccaacagcatcaaggggctgtagggtagagcacagaatttggaggtaggagaactcacgttgaaacccaccttcacctcggtatgtcccatcttgagcaagttccttagtctttctgaagctcagtttcctcatccccaaggtgggaaacatcctgccccatagtatgttatgatgatccaattgatgtaagtaaaagtattccatgatccataaggagctttgtaaccgttagcttttctggtaaacaccaagaaccctgaactattggtatacattctattctatgatttatgactgggggttcattctggaaacaagaaaactagataacaatggcatgcaacgtgaggactagatgaactctagagagaacaaaagtgtcacgttgttcagagaatgacagggaccacagagaaaaggaaaacaagtgtggatgctgtcttgggctcatctgctttccttggagtggagctgggatgggatgggagagtggagggtaaatgtaacaattaatagcttagaaactcagaattttttgcccctgagaagtctctagatgctatgccaacaaagctatctacctcccaagaggagtaagggtaaacatggaaatcgttttcctctgcccctcacaactcacatcttaacagaactgcaaaggtgacagagccaataggatgaatggcaattgggcccataaggcctatcctaggcaggctgcaagatggcttccaataatctcacctcttggtattcacatccttgtgaaatcccctcccctgagtatgaactgcatctaatgactcacttctaataaacagaatatggtctaagtgatggaatgtcacttctgagattaggtcacaaaaaaagttggcttccatcttgagcactctcttacactctctttctcgttcatcttaagggaagccagctgccatgttacaaactgccctatggagaggcccatgtggcaaggaactaagggagttttccagccaagaggcagcaagaaactagggtttttagttcaacagcctgtgaggagcttaatcttgccaatatccatgtgagtgaatttggaagtggattctcctcctgttgagccttcagatgagaccacatccttggccaaaatcatgactgtagcctcatggagagactctgagacagaggcagacagctaaggcatacccaggttcctggcccacagaaactgagataacaaatatttgtttaaagcaactaacctttggagtgctttgttacccaccaagggataaccaataaaaagcccctagcagacctatcaaggaaaaatctcacccacaaaactgagacagagaaggacttctactctggcagcagtgggagaaatttcactgcataattccttcttccccattccatctccagaggacaccatttctactaaagtaagggaacctatgtaagtaaagaatttaggcctataacatactacaaaaatgaagctgcccttccaacaaagcagattttgacaaggtcattttgacacagtggatatactaatatgactagaggggttgcaggtggggtatggatgtagggcaagatacggggggaaggctcagagatggagttagggtacttgccttacacattactggagaggtatagagatctgacattttcatggtttcttttgaaaactaagtaaaaatgttcttggcaccaaaatgactttgtgaaagtagccagatcaaagtgtcaggttctgtcataggactattttattcaaccctactacataaacactgtttggactccacctaggcactgaagccaggaagattgccgctaatcttcctttacacacacacacacacacacacacacacacacacggctcaggagtaggtttccagaatccaacagcacggggtctagaatggagtaagttttaaggccatcacctgtcacatgcctgacttggatttgggctgttctgattcagaggctgacagctgcctgcctagagactggcgccccaccaaagactctgtggagccctggtcatcatggggtcctatgggagttttccctgaattgctcaccaatccagaacacaagaacgcagaaactattgtgcatggtggacccaaagagtgcctttaatttggaatcgatcctgtttgttttctgaagctctctgcattgttaaagccattgatttaccaacatttaataaagaggagaatgtttcctaaacctctgcaaggttgtgtggtcagagatgggattacgcactgctcagcaccaagagatcgaaccagatgcactagggacgagcccttccagtccaacatctcagccctcgcgctactttgcctctgtacctcggtttcctcctgggtaaaaatgaggattgaggtctgctgcaccctgtctcccttccagctcgaacctcctgcatgtctctgaaacctcttggcacagcagtccccaggaaatggaatgtactgaagtttcctaatgtcccaccaaatgaattccttatgagcccgacttctgggtttgtactcaccaagaaaacactgcaagccctgaccttccaaaaactcagcttgttctcattcccggatgcgttttcaaaagagaaaagctaacttttgccctctagggtgggaaatgtgaaaggcacaagtgcagagctctgtgaattgagaccacaacaaaccctgcctgggcatggagcccacagagcgggcgctaaacagcctttgcaaccacagagtggatattctagacgcagaaggtgcccagatgggccctgctttcattctcttgccaactgccgtaaacctgtttctgtcccgttggagctgcaacgtggagccagaaatctggaagaatttaacacccagtcaattcagacacaggaaaacattgttcaaagtaaacactggaatccctccctcatcatccaggaatgtggagccagcagggtctgagctcagcagcttctcaaaaaagcccccctgagctgctttgcttttggggccacagacagggagggccaggaggggctccacatgctccacacgctgccaagacagggacgaggctaggaggtcagtgcacggggcttctcctctcccagggaaacatgggcagtgttgtccacagcctccagctaaagaaccctctgttcccccacaggacccagcttgtgtgcaaaggccgctgaacttgtgaaagcccgaaggaaacagagaggggctcaggacgctgtgagacttttccatttcctttgcctcccagcaggccgtgaaagagtcacttttccttgaggaagaaagaaggctctgtgtgcagggcaagggtacagtccttctaaccaaaagatgtgtgtgctgcatgggatgtggccaccgacattcatttcgcttttactgggacttaacgaattccatctctcaatagccatatgccagggtcccaccctgtttcctctggctctggagggtggagaggaaggacttgctttacccaggggtctataaggaatcttggaaagacactgccccttaaatcacttctgtgtcactgtgtcacctttgtgtcactgtgtccctctgcctaaaattccacctaaattccattcatgaagatgcaggcctgaactgaattgttggaagatttctcacagtcagagtggaggggggaaccttcacattaggaacgttcaaggagaagaatgaagagagtccaaagatgaccacttggccaccagaagctctgagtagagtcctactcagtagcggggctgctgggcggcagcagaggcaagtcgggtcattgtgaagaggcccaagaaacaaaccactaaatgtccagcatgacagtctgtctcatcctggccttcactcctgtatccccgtgacagccacggtgttcacccattcctgaaccctgagggatacaccaccgaaggcttattaatccactcatttaatctgaattattgagggcctcctactgagccaggtgagcaggagggatactgtccctgctgtgggggagcctgtataatccagacagaggctgtcaaggggtggttctgggatcaccatcaccagcagcagcaacaccagggagtttgttggaaatgcaattcattggatcccaccttagcctactgaactagaagctctgcaggctgggcccagcaatctattttcacaagccttcctggggattctgttgctcatgaaaatttaaggaccattgagcaggtctgtcactgcctcacttggtaataaagaaaatctgcaattttcatgatttgccttggggaggtcacagaaatggcgtgagggctcctatgctcctagactcagaacagctatgccaaactgtgctgtcatttggaaatttttggttccagtttcaggaacactttttctacctcagtttggccactgtttcatggtgatttctaaaactttttttgcagaagaggcaggaacctcccctccactcatgaacaacaagacaaatggagcttcttttgacttgtagcacccaccccaacaggggctctgccatcctttctgaaggtggctctgagaaggccatttgcactgttgtcttcaggcccctccccacactgttctctcactcttgataggtgtcaaggaacgtatacagccaggcttctctattgagttgatttctttttttttctttttttttttttttttttttgtgagacagagtctcgctctgtcacctaggctggagtgcagtggcgcgatcgcagcttcctgcaagctccgcctcctggattcacgccattctcctgcctcagcctcctgagtagctgggacaacaggcacccgccaccacgcctggctaattttttttgtatttttagtagagacagggtttcactgtgttagccaggatggtctcgatctcctgacctcgtgatccgcccgcctcggcctcccaaagtgctgggattacaggcatgagccaccgtgcccagcctctactgagttcatttctaaagagatgcaccaaccaatgaggtagaattccattcattcactcagcagatgacttccatgctgccatacggaatgatctcctttgcctcttctgcttatctcatctgacctgttggcaagggagccagcaggcccctttctcctgagtcccagcacctcataggcctctcttctcaggccccatgctggcccctgctcctctgctccacttagggtgagggagcccctgtcccaggcacccttcacgtcttcatctgcaaactcatcacagtgccccaactcccaaaagtgtgtttctagccatgggctcttccctgaactgcacgctcttatatccaatccctgccagacatctcctcaaagatagtttataggtacctcaacctacctcattcaaacagctcctgacacctctctctcccaccacattcaaaacctgcttccccactggccttcttccagtttgttaaccagcacccctaatgaacctgttgccaaaaaactaggaatcttcttttcctctttccctcatcttcaaaatccaatttattatcaaatcatgtcaactcaacctgtaattgtcttaaatccttcgttctctttattctacaattatgacaactactactgctgctaataataatataaaaataactcacactataggtgtttatgttttatacttattaacccattgagccttcccagcaaacctgtgcattaagtgctggattattccctcttacagagggtaaaattgaggcatataaatgttcagtgacttcctgaaagccacacatctaatacagtggaagcagaattccacgtgatcaaacatgttgccccagtgctgcccccatatccgcctggttgcccccacagcctccaaactggcctccctgctcccacacttgccccctgtgtaatctgttttgtccacacagcagccagagtgatctttctaaaacctgcaccagtacacaccactccccaacacaaacatccctttccaagggtttcctcagagcccttgggatgaaatccaaactccttccatggctgcctctgtccacctcttagatctctctgtttctgtctctctccctccctcccccgccttccccaccgccaaccaccctccagccacagtgtcctcctgtcagtcctcaaactcaccaaactccaaccattccctccctccagattgactttcgcagatttttacatagctggtgtttgatcatttaaatcttagctcaatgttgccttctcagaaaggctttttctaacttcctactctaaactagccactcaatccaaatctatcacatcaccttgttctgtttccccgacagcacttattgctatctgaaattattttacatttgtttgtttatgatttattttctgcctgccctcttagaacttgaattccatgaaaggaaggaactgttctgtcttttctgtcatgtatatcccaggacctaaaactataatacagagctctgtgccaggcatagggatagcaaggcgaaggcagcagaatccctgcccttaaggaagtcggcctctgcagttccgctacagcatgcgggctgccacaaggacaggagtgattcctcacccagcctaggaatgctgggaagacttcctggggtagatgacttgagtttattttatttcaacatttattctggaccagacctgccagttacagtgacggatgagaccagtggtctgcttccttagtaccagtatcacctagagagccttttaaagcacagactcctgggtctcatgcccagagtttctaattctggagtaagacctggagtaagcaccaggaatctgcatctctaacaggtctccaggtgaagaccagtgtcatctagggaccacattttgagaaccaccagattggaccattttcttgccacagatcaccatcagtatggctcagtgcaatgctgtgcgccatttgctttgataggaatataggctatatataaatataggctacagataaaaggtatcagtaggtacttcttggaggagctggaacctaggtttcattttgaataataagtaggcattactgaagggatgaaaaacagaaaaaacttgaggaaaaggacaaagtagtatgtagtcttaaaaattaaaatatatttcaatattgctgaagcataaagcataaaacaaagactggccgaaggtgagactgaagtaaacagcagattcgagtcccttaaaaaattagtagcaggaggccaggctgcataaaagccaggtgagcacagcacacttagggaactgcagaaatggctaatacagagggtgctcaagggtcaggggagaggtctctagcaagaaaagattctaggccgggcgtggtcgtcacgcctgtaatcccagcactttgggaggccgaggcaggcagatcacgaggtcaggagatcgagaccatcctgactaacacggtgaaacccagtctctactaaaaatacaaaaaattagccagccgtggtggcgggcacctgtagtcccagctactcgggaggctgagtcaggagaatggcgttaacccaggaggcagagcttgcagtgagccgagatcacaccactgcactccagcctgggcaacagagtgagactccatctcaaaaaaaaaaaaaaaaaaaaaaaagattctaaagaaaagtagaagtcaaaccatgaagggaccctactttggggctgggtcctatggggaaacagagggttccttagctggacactgcagacagaattgcccatatatatgggcattcattcagaagaatactatacagcaatgaaaaggaacaggctacacctattgcagccacatgaatgaatcacacaaacataatgctgagtgaaagaagccaggcacaaaagagtaaacatgagtcgatttacataaagttcaaaaacaggcaaaatatagggtttagaaatacatttagtgtaaagcaagtgtgtgacttccataaattcaggagagtagtgacctctgaggattagagaaaggggttatcgatgggagaaggaaggagggaggtttctagaagctagcagtgttgcatttcttgtcatgggtgactgttactgagtgttcactttagacacatcaccaagatgtaagctgtatgcctcgctttgagcacttcatatttcaaatttgtttttttaaagataaagatattaagatagttgagcaggagatgggggtgggaggaggtggacaggaatggaacaaaaactgctagaaggagggaaatgaagattgtcgagatgactgcagggctatgcatgcgtgtgtgggtgtgagtgtgccattctcttcagcatcagtcaagagccctggattcagggtaaggagagaagatcaggcgtgttgggaaacaatggggaagtgggtaggggagggctagggtttttatgagttgggctgaaattttggatcactgggccggggtggagaacgcaaagcctggagatgtgccaccaggcagctgcacctatcaaagaaagactccaccatcaaacactgacttttaggctgtaattagcaagttggctcgtgtctctctaaggccaaaagtaagtgtctaaaaccagaacaaaatcattctttcccatgttcctaaaaaccttaaatacaaaggtaaaataaacatttattttagaaataaacaatgaaaactgaaaagcaaagtaggccaactatttcccaggcagcaggcctgacctgctacaaattcttggtgtccggtttcagctaggcactcactgtaacttggccaaattttcctcgttgactttcccggcacattccatgcagctccaccctctgtgagccatgaagctgctcccagctgccctctctgcggtgggctctccactctccactgtgccatgtgccagaggctatgctagctgattccaacctaaagtatctcctccttaacaccgtcttctgagcatcctcccgcctgcccgtctgtcatcagagatgtgggtggcctgaggaaatggggtctgagggagccccagaaggtcctagggaagatacaaggctggggtctggccagggatcagtagctggtggggaagtctgagctgagactaacaagctgggtgaaatcagcaagggtccaagtcaggcgggcagaggagccggcaaagtgatattcaaaggtcaagcaagtaacagagtcagaagtcagacagagcacggggaccaggaacccaatgccctctaggagtatggcatggaggggcagacctcgaatgttggcattaggcagtgctaggttcgagtcttgcttctgaccaactgtgtgaccttgggtaacttattaacctctctggccgcgtttttctctggtgatgtgtcactgagcttggggatagggccagggatggggatggagatgccaatgggtagatgtggagacccctacgccaggcaagccttcaggtttgagagctgatgcatccatactccaaatagaccttgagcccgtcaaaggcagagaccagcacctgccctaggcttggcccctggcacaagtcaaaggaggaaatgattagcacgggtccatgagcattacatatcaccctcactgcagcagcggctgccttttccgagctcgcttcttcccttcccaccccttgctagttggagctgattcctgagaggcagcactagatgctgggcattagcaatctgagagctgggtaacaagtcctggggtggggtttctgtgtcctttcctgtgccctcaccccaatctctgctggtgcacctccctggcagcttccctctgctcccctctccagcacttttccaaatgtccctccttatgcacccttccccttctgctttcaaaccttgccaagtctcccctcctctaaacaattcttccattgacccccaagcttccgttacttgtattttgctccttttctctgccaaaatcccccagcgaatggcccataccagcggttgctctttcactcactccagcctggcatccacactcgcagctctgctgacagccagcacagaaaggaaccagcagggatacgggaacagaggcacagacatcaagcagggttcaagaaagtgcaagtgggtgcaacacacacacacaccaacacacagacacacacaccaacagacacaccaacacacagacacacgcaatacagacacacacaacacagacacacaccaacacacagacacacataacacagacacacaccaacacagacacacaccaatacagacacacacaacacagacacacaccaacacacagacacaccaacacacagatacaaacacagacacaccaacacacacacaccaacacacagacacacaacacacataccaacacagacacaccaacagacacacaccaacacacagacacacacaacagacacacaccaacacacacaacacacacaccaacacaaacacacaccaacaccagacacaccaacacacagacacacacaacacagacatgcacaacacagacacataccaacaccagacacaccaacacagacacacataacacacacaccaacacacacacacaacacacaccaacacagacatacaccagtaccagacacaccaacacacagacacacataacggagatacacatcaacaccagacatacaaacacagacacacacaacacagacccacaccaataccagacacaccaacacaaacacacacaacaaagacacttaggtacaaacacacacaccaacacacagacacacatacaccagcacagagatacacaccaagacattcatacaacacagacacacacgcacaaagatacacacaacacacaaaacacacaaacacacagtcatatcacaaacacggagacacatatgcctacacatgcacagacacgcatgctaacgccttccaatatggcagccaaggggctcttgctgtggtcagggaagagggggagggagcctggccatccaccgtggggaggacatgcagcgcgcatcgtgaggactccagacccctgagggtggtagcagcaggagggcaacagaggatcctagagttgctgcacctgggggcagatccagttgttacagggcctgagcattctacagctggtggggaaaccctctttgtgccctgcacaagtggtaagcacttagaagacatccctgaaggagggagagaaagggagggagagggagggaaagggagggggagggagggcagagcctaccaggaagcctggaggaagcctgcgacctgggacccaggtcagctccctgacccaggccagtgggtgaactgacaagtgacagagtctggatttgaacccagggactcggctgcccatgttcttaacctgcgtcacctatctgcctctctcatactgactcaatgtagctcaaacaagtgtaaagcaagagcttccagcacaaacagtgggcttcgggctcaggcctccagaaacactgcctggggtgggagcctgggcgctgggccagcttccacccagatggggagaagggaagggctgcctcatctgcagaaacgagtctcttctgttctcttctccccacccctatctacaccaaggtgcattcatggatcgcaaggtttcttactaattttttgtttcattcactggtgtcttttattccttgttctaaattactttttttaatttttacttttatagagacagtctcactgacacccaggctggagtgcagtggcacgatcatggctcactgcagcctcaaactcctgggctcacacagacacacactcaatacagacacacacctggactcaaggggccctcctgcctcagcctccagagtagctgggactacaggtgcacaccaatgcccagctaatttatttttatttttatttttgtagaaacggggtcttgctatgttgcctaggctggtcttgagttctcggcctcaaacaatcctcctgcctcagcctccttaagtggtgggattacaagcatgattaattatttttaaataagtgacttgattattattgttttgtaaaaatcctcttagtcacctttgtccctataggtttctataggtgcttaataattttttaaaggtatttaccagttctggctaaacattcctttggtcctgagctctgtggagaggtaatgcatctgtgggaacatcatcaccctcatccccaacccatcacccccaggggatgggggggaacgggggtatattttgtgtgtgtgtgttttgcttaagtagagtggtcagccctgagtgtacaatagaatcacctggctgtcattatagacatacctgagctcaagccctctgcagacaaagtaaatcagaatcctaggaatgggacgagcttgttggcaagggttgggcatcagtacgttttacaaagtcctgaggggattgggtgaccaggattgggatccacttaagggaagtaatgctggggactctggggaccctttaatggcaggattattctttgatgaaggacctgaccttctcctggaagttgagtgtgagccttttcactttcaccctcgacttccctctctggggacacccagtgttctggcccagactgttacctgagaagtttctgtgattccccatccttcctgcactatcttggctgttcccctgcccggcgtttatattttgtctccagctgtcccctgtgctctcaatcccacttctctttggctctctctttgctgcagctaaccatcctcttgcccctgccccaaagtgacccatgagccagaagtcaggagtgaaggggggcactgtgacatcagaagttgccatgcaccccctcctgaatcttctgccctgctctcttcctcctctgcaggctcagcggtcaccagcaatgcagtcctcaaacacggacattagagtgattattcccacccccaagagtgaacacctactatgtgctggaccctagaccaaacacatacacacataaagatacacaacacacacacatgcacacacacacaccccaacatgcatgacctcatttgagatctctgatcatttcaacaagcagttactctggcccagacgcagccaactacagagatagacaagacctgtggtctctttccttagtgccagaatctcctagaaggtctattaagacagattgctgggtcccactcccagggtctctgattcagtatatgtggggtggggcccaagaacttgcctttctaacaagctctcagccttcttctgaaataaaatcctctttagataagctggagagagaatggctgtcactaacaggctgttgagaattagcctccttctccccaactccattgaccggccagtgcttggcaatggagagagcgagcagcttctaacctcccctgtggccccaaccgtgaaaaagtccccaagatgccaggaggacacagtgcagagcaggctgtaaagtctggcagtttaattgcagtcatcaactcggggcagcaccaggagacaggctggacttgctctccctgtgttatcatcatgccctgttgacaatcctttgaaatgtctctccctgtgtctgttccttctgctcctctccactcccccaccacctctccaatcccagagttcaacctgtccagccaggaatgtaaagtcccctcacttctctgcaaccacagcaagcacttgagcttcctccaaatcatactgactcaatcatatatttcccacgatctccttttcttcatagttctctataatcttcagagagaggtgcattctagaaaaaggccaggcagaaaacacctgtgtttcagcctcagttttatcatttagttgtaagaaaacatacatcaagtggatccccaacaaaaatctacctctcctcactgcccacgagtcagtacctagagcctcaggcagagccctcattgctgcggttctcaaaaagcctttctctatcctcccctctctccaggctctagttcctcttcaactccagccctaaactccctgaattcattctcgctctggagctcccgtgtcagcggagccatgccttcaacctttccatgggcccctattttgtggctcagtgtccctgagccctgagtatctccattcagttcttcaaacaagttctagacaagggaaggatctgagcaaagtcacggaggtgcgggacagcctgggcgtctggaaatgctacgggaaatgcacaggtgagggggatgggggggagttggggtgggccagtctgacaaggttctgctctctctcccagcaagtctggggaagacagtggacatctttgagtgcacaggccaggtgtgaagtgtagcggatgagcaggggacctcccctgtggttccacaagaacctccaaagactcaccccagaagtcttctgcagcttgaagtgactctctgagctgcttatacctagcgctgatgtgcaatgggccagggcccggcagggagccagaccctcggactcgagaaagccatttgagagtgacatcagcccaccacctgctagtgcgcactcacagtgtttccggaagccatgatgctaatcatgtctgtttctgtgttgtccatggcaagactccaagcccagaaaagaaaatctgtagcccaagttattttcctcccacagggcttgcctggcctttgattgttggctttggggaggtgcatttctccctcctctgtgggcagcaaattccccgtgagtcaacagatcctgtatctgggctcaccatgggcttctactggcactgagaaggggcaagctgagcaaacatgcaatgtgaccccagtgctgaccaacccagagatgccccatgggactcagggacttgacctcagtgcttctggggtccctcagtgtatcttgctggcctcagcactgggctgcttggtaacctccccacaggcaggtactaagtgcagccagccccttcattcaaggcagaatgaattaaaaagctggggttccagagttggctccaggtcacccatgcacacaccccatgccaggtactgctctcaactcttcacacactagcttattctgggctcaaaactcccaggaataccttcgaggcagtttccactactctaatccccattttacaaagtgatgaaactgaggcacacagttcagtaagttgcccacggatacacaattcataagtagaaaaatcaaagtgcaaattccagaacgtacaccactaagaaggggccacgaggcagctctccccacctgagaatccccctgaaatccatggtgagcctgcccagagcccccacccctacccaacttacattggctgctcttccttttgccccagaaccccaaataactggccaaatggactcaggtgtatccctttggcctccacgctcaagttttatatgaaaaaataaaaaaacacagaaaaaactcaatgcgttaggtcagtttattaactctccctcttggtccccaaattgcctttcagggtgttgagcagctgcacacatcaccccttcctcatgaggtccccttggccctttacctccagctgagtaagtcaaaggaggacatatgatcaaaccaggtagtccaccggctgacctctgacctacagcctagaacaaaaaagaggacctgggccaatccaattatctctcaggaacgcaaaaggaggtaggaaacgaacaggcaattggcctcagaagccaaagcacagaggatgctctgaggaacacaaaggccacgagaggtcttgacaaaccaaacttcgatgcaaattggtctataaacttcttaagtctctttgcctgtacagtttgcccctccctctccaataatgtgtccttatctgcagaaggaactgagtttcccatggtctggactgaaccgattacatcttcatagtgtcctttagcaagcgcctctaccccctataaagcagctgtcatatctagagccttgatcagctctaggtttgctttccataaatgatggtgtaaatatttggaggtacagaatacagggttgtctctccttttgcggtgttagcagctattaatgatttattgactagaaacactatttaattaacagttgcagattggtaatattctcaagctatcatttctttttcattttttatttggaacacctctaaaggagacacttctcatcaactgtttgatttccttgcagtttatgagaaaggcaacacaaatgttgaatattttctcctttattggcaggttttcaaaagaatatattggatattcgcaaactccaaaagtagctaaagttattgaggatttttgtagtgaactggtttaaggcagctattggattttctgccactcacaactaaatttaatcctagctgatacaacacaggtaaaggaggaaaagaggcaaaatgcaatgcaatcttttctccactgaactaggtgttccttgaacacagtttatatcccagtcactctcacatctccagagcctacagggatatccagcttatagtatatgctcgataaacattttctgaattaaagacaagaacacaaccatttagacctatcaaaatgaatgaaaatggattatatgagcctttactagaacttgtaggtattggcgagaaatgctaattctaccagatggctgaaagcccaggcaggagaatggacacctcaaatagtaatataatggtataggccaggtgcagtggctcacacctgtaattccagcactttaggaggcccaggtgggctgatcacgaggtcaggagattgagaccatcctggctaacacggtgaaaccccatctctactaaaaatacaaaaattagccaggcgtggtggcaggcaccggcagtcccagctactcagggggcagaagcaggagaatcgcgtgaacccgggaggcggaggttgcagtgagccgagactgcgccactgcactccagcctgggtgacaaagcgagactctgtctcaaaaaataaaaaaggtaatataatggtataaaactgaatgtgcctggtgacatggcttataatgtcaagaatctggaaacaatctaaatgctgatcaaagggagactgattaaaatatggaatatccatataatggaaattcgatgtctctaaactaatgaggcaaatctatatgcgtaatgatcacaatatatatttaagtaaaaacagcaagatcttcagaatactacaggaccccccaaaacaagcaaagccaaagaaagtaaatggcaaattaaataagatgggcaagagtggatgactgttagtgtgctgagtgatgggtatgtagatgttcattgtaccagtctctctattcttgtgtatgtttgagaaaattctgcaataaaaatgaaaataaaaacaaaaccacttgtctgagccctgttttttagtgtgtttttcattttgttttcattccttatttaaaatatttcaaaattcatcccttgtgaataatggaagggagattaaacctacatttaaatgtttggatattcatagaagacaggtctctggaatgctatgaaattccagctgtaactgtgatactgtgaaatacatatttggtcttcaacctgtttcctgacatacaactcctaaaacccttaccatttcaaaagtgttgtccttttgtatgctaatgagctggctgagggttagcatcctctaggtagcttcaggatgagactggtcaccagaccaaggcaggattaaacagttgggactttcagcccccagtctctggggaggagagaggtgctgaaggttgagttgatcaccattagccaatggtttaatcaattatgcctaagtaatgaagtttccataaaaacccaaaagcacagggttcagagagcttccagacaaacgaatgcatggaggttcctggaggatgccccagggagggcatggaagatcccctccccttttcccatacctagccctatgcgtctctgtcctttgtaatatcctttataataaactggtaaatttacatgtttccctgagtcctgtgagatgctctagtaaattaatcaaacccaaagaagagttcttgggaaccccagcttgaagccagtcagccagaagttccaaaggcccagacttgtgactggtgtctgaaagggagacagtcttgtaagatccagcccctcactctgtgggatctgacgctgtttccaagtagacagtgctgaaactgaattggagggctcccagctgtggccactgcggaactgactgcttgcttggtgtgtggagagaaacccccacatgtttggtcacaggtattttctatgttgatcgttgttatggagtcagggaatagaaaaatcactttgggtgatgtgcttttccactcacagtaactgatgaggaagaaatgggaggcttgctcattgtaggaatgttttaccacatgcctatgtgacatattgattacagaagaactaatattaaaaagaaagtatgagaaagagcgacaccggccaggcgcggtggctgacgcttgtaatcccaacactttgggaggctgaggaaggcggatcacgaggtcagaacattgagaccatcctggctaacatggtgaaaccccgtctctactaaaaatacaaacaattagctgggcgccgtggtgggtgcctgcagtcccagctaatcgggaggctgaggcaggagaatggcatgaacctgggaggcggagcttgcagtgagccgagatggtcactgcactctagcctgggcgacagagaaactctgtcttgaaaaaaaaaaaaaagagagaaagagtgacaccaatcaccttttgctctctgtctggctaattcaaagccaacctttaagttccaggtcaaaggtcaccttccatcgtggggcacagaactcaagcaacattaatgtccctaacaaaccagtttggtccattaagttgtggtaggggtgactgcctgtctaaaggagttgaatttcaaaatctttaaaacacaacagtagcccccaaacatattttgtagaccacatctggatctaggctccagattacaatcccacataaaaaggattcttctccctgactacccacccagtatagaactgatgttccctctgctgtgccccatggccctttgatcatacttcttttgacacacttataccgtatcggactatagttctttgaataagaactttggtaattattgccagcctttattgagggcttatcagtgggcaggcaacatgccaagagttttacatccatgatctcacttggccctcacagccacccttgaagctaggtacaatttttaatccccatttttcaaatgaggaaactgagccccagagaggttgaataatttgctcaaggtcatacaactaccaacaggatgggcgcacagagctaggattggaacccaggcagtttggctccgcagtctacctgcttgaccagcattttattttgaaagacaggacttgtgtcccaatcctattgggagattcagtgtctagcaccttagtttaaataaagcaaaattaattcaacagtacttccttgggcaactacagaatgcaaaatttccttctctacttccattaaggcaatacagagagttgtgttcatttgtgtcttacctgatccaagggttcttttcaagaaaaatagctactgtgcagataaaccttgaaaacattaggctaagtgaaagtaactggtcacaaaaggccacatattgtaggattccatttatatgaaatatccagaatagacaagtccattgagacagaaagtagagttcttagtgctgggagagaataggatatttggaaagtgactgctaaaggctaagaggtttctttttggggggaaaatgtcctaaaaattggttgtggcaatggttgtacaacttaagtaaagacactaagaaccattaagttgtatgatttaaattgtaaaattatatggaatgtgaattatatctcataaaggtgtttgaaaagagaaatatctaatgaactttctttttccaaataaatgctgaaagcaagatgagaaagaaaatagatgaaaaatacaaaaagaaaataacacagtgggctgggcgtggtggctcacgcctgtaatcccagcactttgggaggccaaggcgggcggatcatgaggtcaggagatcgagaccatcctgactaacagagtgaaaccccgtctctactaaaaatacaaaaatgaaaaattagccgggcgtggtggcgggcacctgtagtctcagctactcgggaggctgaggcaggagaatggtgtgaatccaggaggcagagcttgcagtgagctgagactgcaccactgcattccagcctcggggacagagcgagactccgtctcaaaaaagaaaggaaaagaaaagaaaagaaaagaaaagaaaagaaaagaaaagaaaagaaaagaacacacagtgatagactatattgcttagctaagtggatatctagatagatgatggatagttttagacatcagtttcctgttgattttctcatgttgtcccttccaaaccagcaacctgagaggatgagagatcgatcaacaaattatgtaagttactaagttgttaagaagatggcaaacaaccaacagaattaaacaccaagccacatatacacaagtgctccctccattggctccttcagcactttcttaccagttctggtggcccaaatcttttgagttgtctgttacttctcttagatgtacatcaaaaaccagctctgagttgtgttttcatgatggagcacaagacagattttacccagtcaacccttaactctcaactcaagagagaaagaatgtggcaatatagttatccagaagggcaggcaatcccttaggaatttctttcatctttggaacacattacgtaatttattttgcaagagagtctcatagttaattccatttttcattggcaactaatagtatgagttcacactccccaaagtaactctggagatacacagcctgctgagacgggaggagtcgagcaggctgtgaaatgttttccacgctttgagtgcatacggtgggtaatgcacatagaaatgtgtgtggagattcacaatcacatccacacagctttctagatagacccataagattttccgttccctccgcaaaatccataagccagcgttccttccaaccacatgtcacccagtcccaaaatgtgcaaatttttaaaggttcccctgggtcttatatcttggactctcttgtccagtgtttctcaatccttgctctctttttcattatgatagcccagtgttcccaaatgtcattccatgaaaggtacttctaaattacttgggagctatttacaaacacctatttccataatccacaccctggaatgtaggtttaatagatctggagtgaagtctaagaggctgtattttgtttgtttgtttggttagtttttgttttttagtgttttcttaaatgttttaagtgtattgatttatttattaattttagttgataaataataattgtgtacacttatggggcacaatgtgatgtttttatctatgtataaattatagaaagattcagtcaagctaattaacatatcctcagctcaccaacttacatttttgtggtaaaaaaacattaaaaaatgggcaaaggatttgaactgacatttctcaaaaaaagagatacaaacagccaacaggcgtatgaaataatatttaacatctctaatcatcagagaaatgcaaattaaaaccacagtgagattatcacctcacacttgctgtgttggtgaggatatggagaaaagggaacccttttacactgttggtgggaatgtaagttagcacagctattatgaaaaatggtacaaaagttcctgaaaaaatgaaaaaatagaaccaccatatcatccagcaattccacttctgggtatttatccaaaggaactaaaattcatatatcgaagaaataaccacattctgatgttcattacagcactattcacagcagctgagatatggaatctacctgtgtccatcaacagatgaatggataaagaaaacgtggtacatatacacaacggaatactagctagcctttaacaagaaggaaattacgtcattttcaacaacatgaatgaacctggaaggcattatgctaagtgaaataagccagactcagaaagacaaatgctgtgtggtctcatttataagtggaatctaaaaacgttgatctcactgaaacagagtagaaagctgatatcagaggctgtggtgggggcagcaggggtggatagaggaaagaggccgggaaaggagagatattgatgaagacgcaatttcagttagactgaattcattagttttagtgatctgttgccctgcatggtgaccacagttaataataacgtattgtacatttcaaatgtgctaaaagaataggaagctgtatctttaacaaaagtctgggaaccattggcctagattaccacaacagcacccaactggccttcctccttctgctgtaatagtctaaatctattttttttgactgctgacaactttttttttttttttttctgagacgagggtctcactctatcacccaggctggagtgcagtggtgcgaacacagcttaccgcagcctcagactctgggcctcaagcgatccttccatttcagcttcccaaacagctgggactacaggtgcacaccattatgtctagccatttatttatttatttgtttatttattttttattgttttggagagacaggagtctcaatattttgctcaggctggttgcaaacctctgggctcaagtgatccacccacctaggtctcccaaaatgctgagattacagtattttgagtcacaacacccggcctgctaacaacttttaagccttccctttccctcacccccttgtgccttgcatctgggcaagctcatgtgaaagtctggatgctctttgttggtgcaagcaggaaatccaaaccacacaagcccctgcccacattgtaaccactattaaaaattccaagccggccgggcgcggtggctcacgcctgtaatcccagcactttgggaggccgaggcaggtggatcatgaggtcaggagatcgagaccatcctggctaacaaggtgaaaccccgtctctactaaaaatacaaaaaattagccgggcgcggtggcgggcgcctgtagtcccagctactcgggaggctgaggcaggagaatggcgtgaacccaggaagcggagcttgcagtgagacgagattgcgccactgcagtccgcagtccggcctgggcgacagagcgagactccgtctcaaaaaaaaaaaaaaaaaattccaagccttggccgggcatggtggctcatgtctgtaatcccagcactttgggagaccaaggtgggaggattgcttgagcccaggagttcaagaccagcctgggcaacatagtgagacctcatctctaaaaataaaaataaatgaaaatcaaatcccaagccagtcttttttcttgctctcccaagctgttttgaactagcttgggatgtcttccctgttcttccccagaaagcctcatcatgtaagtcaggggcgtccaatattttggcttccctgagcaacactggaagaagaattgtcttgggccacacataaaatacactaacactaacgatagctgatgagcttaaaaaaaaaacaactagcaaaaaaaaaaaatctcaaaatgttgtaagaaagtttataaatttgtgttgggctgtacttaaagccatcctgggccacatgcgacccgcaggctgtgggctggacaagcttgatgtaagtaataaacatgtgcatgctctcttggtatgtgtgatggcgtcaatcttgacatccaaactaaatttagggtggggatccaccttgcttctgcaaggtaaccacagcatctggtctcttgccattaaaagaattctccacatcactgctggagttatctttcagaaaactcgctttgctcgggttccagatttgtgccatgatgtccctcggttcccctccctacaatcccagtagtgccagagcactctgccccacttaaccttgtcagcctcatcttcctccacctttcctctcacacgcctcaaggggcaatcacaccacagtggtgatgctacaaagcactgataagtttatttccaatgtattcccactgccttcttctttctcactgaaaagctcaaagaaaccacaaagaaaccaaagcacttctatagttaaacaaaatctgaaagcagaccagcagacctcgttttcctgccctctaagaccagacaatagcggggctggggaagtggaaaggatctggtggaaggaaagtgaggagacacaggaagaagggaagaggagaaagagcagagcctcaatcaagaggcacttcccttcctcccagcccagcttcacctctgtcaggccttttctgatcttccctctttggggctctcctgacataccactcacacttatttcattgtgatattgttggttgttcatgtttgtttactccactgggtcaatggcttcttaaaagtggggagtgcgctttagttgccccacatccaaggcacacagggctggcaggcctcctgccatacactactaaattattaatttttagaaatcctgcaattaacttaagatcatatgataatatgacactgcatttttagtagactgacaagcattatttttcaatgtaagcattgtgaatatctcagtgagcttggaactttgttttcttgtttctgcttttcacagttccaggaactctgaagtggcctgtggctcccttgatctccaacaacccctgtgcatacatcaaagtcctagacagaaaatgttcaggaaataaccactgatcagttgctacctcaatgcaaaattccttgaagatggaccaatgccagaagccagtggttttcctacaggaagagaaacttgatacttctccctgtcttttccagcccagatgaaagggcaccatatgcccatacttatcccataaggcaggtcccagcctcctgagccactctgcagtgattttttcctagcatgtttctcccatggctactaaccacctgtgagacccaggcagtaagtattccagttccaagcagtttatggcacagtaggaagtaggttctgccttttacaatgtgtgacccttaggaagctccctttccctccctaagagctcaatgtcttcattatagaaaggaaattataataacgtctgccctagtcaccttgcaagaatgcctttagtattaaactagagaaataacagttgtggagaggttcataaactgtccaagggccatgcaaaagctttactcttagcttctcctttgtaagtggatgagcctagcttgccaaggagaatagtcccgtttgcatgccaaaaacacttgacacagcatatactccctacgaaatgaagctagaattaataatgcacagaggtgtaggcacgcccaagtgcattgtctagtaggacaggcttttgcaaccttttttataacgcaatccatcttttgaaaaaaagaaaatctcgttccttccttttatcttatttgaaattccaaataagtaaaataatcataatcattaaatatcatgattccaagatgaccccctactactctccctcgccagctgaaaaccacttttggggttattagctatcttgtttccagatgaggcatttataacacaagctaacacttattacaaatgtatatgtgtcaggcccatttctaaacttttacaaatcctaactcaggaactagcagcacctctatgagatccatattcttacttctcccattttatagatgaaagacctgatgccccctcaaaagaggaaaagttggccgggcagggtggctcacgcctgtaatcctagcactttcagcggccgaggtgggaggatcacctgaggtcaggagttcgagaccagcctggccaacatggtgaacgctcatctctactaaatacaaaaattagctgggcatggtggcgcacacctgtagtcccagctactcgggaggctgaggcaggagaattgcttgaacccaggaggcagaggctgcagttagcagaggtcgcaccaatgcactccagcctgggcgacagagcaagactccgtctcaataaataaataaataaataaataaataaataaataaataagagggaaagttatttgcttagacacacagctagagcatggcagagccaggctttgaatccctaaactctgagaggtttaacaaactcactaacataccactcatcgtttcaatttgattttcatccagcaatggataagccattttggagcatctccagattgagcttctaccatgtgaagcccacctgggaaccggatgcagcagcgctcagcagaacagctgccctgggaggcactgattctagaaggcccctgcctgaacccactcaaacaccacgcgctctcgtggagcccctcctgtgtcacccctaacaaccccacaaaataggtatttttttaaatccatgtttccacatgaggaagctgagcccggtgagactgccccccaggtcttccctagaaccacagtcttttcccaccttactgcacccccatcccagacagagcctttgagacgcctggggctgtccactctcaccacgaataaacttgctcaatgacggatgagaagccgctctcaactcgcatttcctggaacaggcacacatcatttctattttcctaatagcccactcccttctgaggaatcaacctccacccagcctgaaagctaaagagatttttctagaaaacttcaaaaacatcccatgtttgaagcatgtattacatttccaaatatgtctgtactacatttaatgactgaatttttttcttcagccatggagctagaagctgctgaacataaaggaacagaaatattcatggtctatgctggttccaggcatagaaagccctagaaataggttaaaccatcaagagtataggaaccacagcaaccaaagaagaaaactaaaaatcagccttgtcactgggttttgtgtccttttggaagagtgtctaggtgaaatgaaatccaaagaaagcctggtaagaaagaggcacaccagggcagacccccaacccctgtttatgatgagtggaaatgacaatggtgacaggaaatactgcctcggcatgagaaggatgacatttacacccacagccgggtagagggcacgcaggactggaccccacaacttcccctaatttggaggtacacaggctggaggcttcctgatggagaaaatcagaattaccccatgccagtctgagagcccagccccatcaccccataagcaacatcaaagcaaggctgtctccacgcttctccaccctttagtgacttctcactaaaaatgatggggtcaggcgtctttacagtattggactggcttccccgaccgaaataggaactctgctaaccctattggaatataagctctgtaatatccatgtctgtgtattccttgcacactgttgtgtcctcaaacctagaaaagtgcctgacacaaaagaggtacttgccattcttttgtttactcgctaagaaaccaaataaacagagaagtgaagacataaatttattcacccggcacctggggcatctgtcacagagaagatgccaatggggacatgagctcctcatgctggggcagccgccagctccagcctctgcccctccctgcgtaactctgaagctgctgggctgggaaaccagcatcttctggagaggttttaacggcatccaggtaaacaaggagaatcacttctggggagaccagccagagtcaggttagatacggtttttatttcaggataaacacgtgaggaagaaagcataaaaactgtgagacattctaaattagaaatgcagagatgatcgaaagatgatgggtaaatagaattacatagatggaattcatatatatacacatatatgtattcatatgtatatgtgtacgtatatgaagatatatatggtacagaatgcaagaaatatacaatgttgccttcttcccctcagatcatttgttttgtttctggccagtgaaaaaattatatgaaaaaaatggaaattccttctctttatttgaatggcttcccataaaatatgagattttctacatggaactgaaacgttaagcatgtaaggctctcagctgcaagagagagttctataagttgaattgcgtccccagaaaagatgttgaagccctaaccccaggacttgtgtatatgtgaccttatttgcaaacagggtctttacagagctagttcagttaaaatgaagtcatcagggtgggtcctaatctggtatggagtcagaagagggggaaatttggacaaagagatgtgcacacagggaaaataccaggtgaagatgaagacaaagattggggtgaagcatctacaagctaaggaatgtcaaaactcaccagcaaaccaccagcagcaaggagagggccatggaacaggttctccctcgcagccttcagaagtaaccaactctgccaacactttgatctcaaatttccagaactatgaagcaataaagtgctgttgttgaagacatccagcttgcggtactttgtgatagcagcccaaggagcataatacagataagcactggcttaagcacagaaagcagcagcatcaggactcagttcatccaggtttctgtaagttctgctttccgcagtctgggctccactccccagcaagtggtcactatgtggtggaagtggtcactacgtggtagcccccagaagcccctgacttacaacttcccagtttcaagtcctctcttggaggagggcttctcttcccaggagttccaacaaaagacctgaaatcaagttttagtgacttgaatcttggggaaggggccagcctccaccacaccacagggtctgaaagagggatgaagatttttccttgtggaaaatcattaccaattatatatcattaccaaagaaacagcgggtggaggctgaatgccaaacatgcaaacacacgaaggtatctggaatacattttaacacaagggatctgtgcatccatccaatcaacaggtatttattgattcattcatatttcatgagtgactattatgtgccaggcaccatactagtagctagaaataaaacatataatgatcccggctcttatggagtttatatccaagcaaggggaaatagttgataaaatacaaacctaaaatgtaaattatataggatattaaaggtactgtcaagctctaagagaaaagaaaatgtaaagcaagttcaggaaagtgtccagtttgtgatgtttggcaggcaaaacacagcatgcttcattaaaaagtaacagtgaaataaatatcttttaaaaaatgagctggaataactatatgggtatcagagagaagagtgttccaggcagagagaacagcttgtgcaaaggccttgagacggagaagtgcctggaagttcaaggaacagcaacaaggccaagcagctgaaacagagaaagcaagcggggaaaagagtgagagatgaggtccaaggtcacaggaagccaactcacatagagctttataggccaatgtgtggacttgcactcatgttgaacgatgtggggaattgttgcagagttttgagcagaggagcggcatgacctgatttgcatttgtaaaggacctctttggtcccttgagaaggatgaaggaagaagatcagttaagaatatttgcactgattcaagcaagggatgataagggctgtgttctagatatgttgaagatgagattgacaaatttcttgatgaattggatatgagatgtaagagagagaggaatcaaagatgactgcaatgttttcagcctgagcaactgaaagggttgacttgcaatcattgaaacaagaaaggatgcagggagagcagatttggggtgggattggattaggagttctgtttggaatgcatcaaatgtgaggtgaagaagttcaggaaatgccacctgaaagctgatgctttggtgtgccgattacttttaactgagggcatttggggagcagcagatgcaggcagaggctttctctgagctccccttatctgcctaaggacagatcctccaaaaggaattcaattgtcatgaattccttccccaggaatctcatcaaccagggaagaacacaggaaaggagataagattgacaccagcactgacagaccatcacttactcctctcaggcaacgtttattacctgagagacgtttaacaagacaacatttatttgccactcatttcctcccctcaccctcccataacttgttccgctaccaccccccagaagttccaagtccctattcctttctgtagctgaggatgctatacaagcttcaatcacttaacctctcaagtctcatattttgtgggactcccatgtcccacataattaatgtattaattaattaatacataattaaacgtagtttttctcctgctattctgtcttatgtcaatttaattcatagcccagccaaggagcctagaaaagtagtgtctaccagagaattggtgagtagagaggtcaagcaagaataagcaaacacctagagggcatttgggctgcagagatgaagtttttagtagagacagggtttcaccatgttggccaggctagtttccaactcctgacctcaagtgctccgcccacctaggcctcccaaagtgctaggattataggcgtgagccaccacactcaccctaaaataatttcttaataactcctaccacactagcattcagtccattgcaagaagatatttgaaacttagagactgggtgaggtcacctaggaagtatatatagataaagagaaaccaatctgagtcctggggtgctccaacatttaccacctccacggctatcacccaggcccaaaacatcctcaactacatttcagcagcctcctaaccagcctccctggttccacacttgcccatctccatttatctccacacagcaggcatagtggtcccatcaaaatcagatcccaccactcctctgctcaaaccctgcaaggggcatgcagatgtggtacatccatataacaagatcatatttgtcaataaaaagaactcgggtacggatacatgttccaatgtggatgaaccctgaagatattatcctgcataaaataagccagtcacagaagaccctatatcctgtggtccatttacgtgatatgaccagcataagcaaatctgcagacagaaagtacattgatggttgtcaagggttaggggagagaggaatggggtgtgactgttaatagggatgaagtttctgaaattacacaattctatgaatatactaacaaccactgaatggtacactggccatgagtgaatttatggtacatgaattctatctccataaagtagtcccgccttatccacagggattacattccaagaccgccagtggattcctgaaactgtggatagcaccaaacctgattgccattagtcagaacgtggaacatgtttctgttcatgtcttctacccacaaatttaatgctttttccatcttaactaagcacttgtcatacatcatggtcatagcttttgcagtttgaattgcgacagcaaaactagtaggaatttctttttcctgattcacaatttcacagtttcacagatagaacattcgttctttttctttcttttctcttttcttttctttttttttttttttgagatggagtctcgctctgtcacccaggctggagtgcaatggtgcagtctcggctcactgcaacctccacctcccgggttcaagtgattctcctacttcagcctcctgagtagctggcattaccggtgcgtgccaccatgcctagctagtttttgtatttttagtagagacagggtttcaccatgttggccaggatggtctcaatctcttgaactcgtgatctgccacctcggcctcccaaagtgctgggattacaggcttgaagaaggttcattcttactgtagaacttaacaacgtcagcagatgtttttttttccgtcattgagaactttcaccttttcacttgaaggaagcactttatgacttctctttggcatatctgaattgccagcactgccactcttgcacccaggggccattactaagtaaaataagggttccttgaacacatgcactgcaatgctgccacagtggatttgataactgagtcagctactaagtggctaagaggtgcaatttaaaatatgaattatttctggaattttccattttatgtttttggaccacagttgatggctggtaactcaagctggtaacttttggaaagcaaaattgtcaataaggggagggaccactgtagagctattttaaaactctgccctggctccccctactatgcagacagaagcatcatcattcaaagcctcacattctaccgacgctctctccccaatctctgatcttcacttctcctactgtccccctcctggctcctcctgccccagccactgtagcctccttgttgtgcctcaaacatgcacactacagacgcaaatctttgcacctgctcctccttctccctccatttatctatgtcattactatgacatatgtcactactttacctctctcaagtcatcatccaaacatcaccctgtcacttgccaaagcggccctcctggcagcccacatctgcccatggtggtggtatacgctccccaatcactttcttgcttcatgtttcttcattatccttctgattatttaggccactagatacttattcattttgtctattacctgcaacaccaactagaaggtaacttgcacaagggtgggaattttcactggatgtattcattgtcgaatccacaggacctagaacagaggccagcacccagaaggcactcaatagacatctatcttcagtggttatgtggttatttctgtgcactgtcttatgggcaaccagatttcttttctgaggttgtttgttgtttggggagattttggggccttgcaagttttgtacaatgaatatacattacttagatagtcaggaaaaaatgttatataagggggaaaagtcctaccactgctgccactgcctgtgggatgcaatcctgaactccttagcaggcgctggcttttccaaagtcaaagctcttcctcccctccctttccactgccctaggtcaaaatgaatccagtggagtcctggttccccgagatgaaagtagatgttctctgaaacaaaaagagagaattccctgtgcttaaaaatggttaaacaggttttgtcgtgtttggtttggtttgctaagagcctgcagtaagctttgcacatcgtggaactctaagaaggccacatagtgggatacccaccctgacatatttgaccccagaacctcctcttttactggctcatctccaaggactcgagttccaaggaacaagtcccagggacgtcgcccccatcagacaggacacttggctgtgcagcagcccaagctcctggaatcctctcccctcctccacctgtagaaactctacccatgcttcacaagacagtcctgcttgtgccctatctaggaatccttctctactctcagcccctcattcccctgtgtttctacagaacatcacatctatgatgaaagctcttatcatggtcattgctccagctgtcatcaacagctgtcatcaactggtgtcttcaacaccagactgcaagcccctcgggtgcagcaatggggcctcctccacatgggtttcccaagggcatggtgtgatgctgggctctgggaatgtttatgccccagaactgccactttggaggcaggtgggcctcccttcttggggtgagcagcccagcaagcaggccggcgaggagcttcatgcagcatcctttccgcttccccttctcagtatctctgcctagggacagaaagtccctggaaacctaggggtgaggatcttgggtgtctttttcttagctgttctctttatctttggaatttctttaaaaggctgttttttaatttaattttttatttttattttcatttttatttttttttgagacggagtctcactctgtcatccaggctggagtgcagtggcacaatcttggctcactgcaagctccgcctcctgggttcacgccattctcctgcctcagcctcccgtgtagctgggactacaggcgcccgccaccatgcccagctaatttttttgtattttttttaaagacagggtctcgttctgttgcccaggctggagtgcagtggcacaatcacagctcactctagctaattagaaaaaaaaaattgtagaggagggggtctcactgtgctgcccacgttggtctcaaaatcctggcctcaagccatcctcctgcctcagtctcccaaagcactgacattacaggagtgaaccactgcatccagccaaaaggctgtgtttaaatcagaggacccggtatctggaattaacctggcctggctatgatggtgtcatattgagtctggcatcttctgttaacttactggttggcaaaggagctgtttggaaaataaaaactgccttctctgtgggaagagggtcgatctgctgtgggggttggggggagtggaaagcaccttagattgagagtcaggaagctcacatttgagttttaacaatgtcactaacattataaaggtttagggcaatcacctaactcttccaaaactctagttccttaattctaaagtggaagaattttagggatccttcacagctctaagactaaagatcaacttaaaaagaataacccttggggtatctatttgcagagaactgtctttctttttccttttctttttttttttttttttttttgagatggagtctcgctctatcgccaggctgaagtgtagttgcgcaatctcagctcactgcaagctccgcctcccgggttcacgccattctcctgcctcagcctcctgagtagctaggactacaggtgcccgccaccacgcccggctaatttttgtatttttagtagagacagggtttcaccatgttggccagggtgatctcgatctcttgacctcgtgatccacccgcctcagcctcccaaaatgctgggattacagacgtgagccacggtgccgggcctgcagagaactgtctttcaaaacgttctagtgaccacatagtacagtctcacacagggaggctccgtggcctccaccaccagccagcaacgtcagaggggattgttcacgcccttgctagtgtcttccaagatggtcctttgagaggtttgtagtaagtttgtagaatactggtgagtcggtcagggacagcttgagtatgattcgcaacccccaaaaccacctccctatgggcaaaccgtatccacagagcacattcataagcctgatttaaaatactcgctccttgtgcctcagccattactctctttctgtccaggtctcttattctgacttagtggaaaataaggttgttacagcaatggctccattcgtcctgtgggcaagaaactcatggagagaattagtcaattcttcctggacattcgggagcttctgggtggagggaagactgcgaagcagaaacaaacagaaatcctagagaggcagtcatctgagcattcgtcacaggggcactcctaggatccaccctcagaagccgtgaaaggcccattgatctggctggggcagggagtggccctgagctggtgacatctcaggcgaggaaaggcacagatgtctgtgctggctgtgataagaggcttctcaggaaatctgagtcacctcgggccggctcttcgaagcatagaggcccagcaagcaccacagcctggaggcaaagcttcctgctagccctgggaccctgggactttgcatttcctgttggtgtcctttgacttgggcagccaccacccctgggaagttttccaacaccctcactcatgcattttgaacctggtgttcacagctctttgtctctgctcatctcgcttttgtttcctctggaatgttccaagccccctgcatcaccccatgccaggaatctgacatcccagagtggaagccggcttcatgttactcaccccaccctgtgatttcctgatggaggatccggagacctgaactctggtccaggtttacagacaactcataatcatggttgaggcccctttctaggccttactgttctcatacttttaactggggatgggggcaggatgggaaacttttggaaaaacagactttttaaaactggaatgatgctagacatttatttgctactacctgctggctgctgcctgtcatttcatcattacatagaaaagaaatgctccaacattttgtcatgcatttactccttggtataagggaaggattcaagaaacgtcttatggaagcaaaaataacagtaaattatgcaaaggcactggttcccttcaggggctggagtaagactggtgagagtcgtgggaagggaagaagcacagagagaagattccacttcacgcatattttttagggtttggcctaaataaaaggactttcagagattataagagaatatttgtgtttaaaaaaaacacgttagataaatttaatagagttaattgagcaaaaaattattcaagaattagacagactcagcacacccacagtgactctggtgcatggtcggagaggatttatagacagaaaaagaaagtgatctacagaaaacagaaacagctaggctgcttacggctccgtgtctgcctgatttgaacacagtttgagcagttgatcgcctgtgattagctgacactcagctgctctgatgggctgacactgggctagtggctacaagcctcggttacagtctctgtacacatccagttaggttatcatctgcacagcggaatgtttaggtggaacttaaaatatgtaaggaggcagcttgggctaaacttgttaacatttgctagagaaaaaaaaaaacatctgggagtcaaccaatccatctttgatttctcaactatggagaccaccaccttgagcatcttctctaaggtcccgtagccaggagtaatacctggtatcttgacttcatagcccatgacattggacaagcctctcaacctctcaggtctcaatttcctcaattgtcaaacaaggatgacagtaggattgtggggaactaatgagtatatttactcgattttgaaacagtaggtgtgcaatagatgttacattgccatcatcatcatcgtcatcatcatcatcgtcatcatcgtcatcatcatcatcatcatctcactatcactacagctgctgttcctgccacccaggtctcccagcagcaggttgtcccctagaaccacacccaaaccatcctcctaaccaatgctgtgcacccttcagtaagacttttcaaaaatggacataaaacaaaatagttcttaaatgagcctacttctatttttcacatccccatttccccaagacgtacctgtgctccagatggaaaaccatcaattacaatcctgctccttctgcggcagggcaatggggagtcacccaaaggagcagcgatgctcaagccccccacagaaggacccccagactcccaaagagaaatggacgtgaacgtgggtgaagtcttgggctgatcagagagcaagcagggccaagggacatgaagacaggtgtgttcttagagactggtcacaggaaggagcagactacctgccccctgccccctagtccaagcctggttctaggttagaagcgaatcagctggaagaggaacagctgctgaacagaaagcacagccttgtgccctcccagagagcaaggcatggcatgcacagcctgccccaggctgctgccagggccaccgcggggggtcagcttccattgctgagctgtgctacgccctgggagcaccaatctttgtcaaaagaatggatttgtgcagctaaaccccacagggcctggccattgtggacctgtctgtctgcatttcaactctgggcttcactctttggtgaatgtgaatctccagcggcacaggcagccagaacagaaacgccacgcagtctcaccctgtcatgccaagagctttgtccgctttgggacagagccctgtgctgggagtccattggggagactcacagggatccagaaacctgctcctgccctcagggagcctgctgtgtagcctggagaaggaactcataggcatttgcagtactgtctatcttggggtctgtcattctcatctaaattaatgttaacagcactaacttagcctttcttacatgggtgtgaaaaccaccaacattcctggtattaggaggtgggccttcaggaggtcattgggtcatgaggctggagcttgatgaaggggattagtgcccttataaggggataaagagaccagagcaagtgtgcttgctcactccccttctctccctccctccctctctctcccatcctcctgctctctctcccctactcctccctttctccctcacccaccccctcttcctcttttccttcctctctccctccctctctccctccccctctccctctctctctccctctcttcctctttccctccctcccttcctctctctctccctccctcccttcctttctcactccctcttctctccctccctcctctctctctccctcccttcctctctctctctccctctgcagatgcctggccatctgcaagccaggcagagggccttcaccagacactgatctctgccttcccatctttcagaactgcaagaaatgaatgtctgttgtttaacccacatcttgttacagcagcccacactgggcaagatagtgctatccaaagaaaaggtaacaagtccaattattcactacattttcacatatttgaaaagcgtatgcaaacagtgtgttcccagtagtcctttttttttttttttctggagacagagtctcgctcacgcctgtaatcccagcactttgggaggctgaggagggcggatcacgaggtcaggagatcgagaccattctggctaacatgttgaaaccccatctctactaaaaatacagagtggtggtgggcgcctgtagtcccagctactcgggaggctgaggcaggagaatggcgtgaacccaggaggcggagcttgcagtgagccgagatcatgccactgcactccagcctgggcaacagagcaagactccgtctccaaaaaaaaaaaaaaaagaaaagaaaagaaaagaaaagaaagaaattatattaaaccactccctgggaagtcaattaattttctgtagaacaagtgcaaaataatacttaccaagaaaaaagctcattaatttggtcactaagagaagaaaccaaaatatagacacatcttctaaattatacccaagtagcaaaaacagtacacactgtttgtaagatgctggaaaaagagactccatgataaatgttgagcttagcataaagcagttggcttttattctaatttattaataggcaaattcctttatcagatgatattgttggatactataatatcagtaataccacgtataagagcacttactactgacagtgactgcagatgttttcatctgtaatttgtctaagccagtgcttctcaacaggggtcaattttgccccccaggggacatctggctaaatctagaagtatttttcattgttacagctgaggaggaagagggacaagagagtgctactggtgtctgtgtgtcaaagccaggaaatctgctaaaatcctacagtgaaaaagccaacccccaaaaagaattttctgacccaaaatgtcagtggtgctgaagttgagaaactctgatctcaaccactaatacacagaacatgaaccagctgtatgaggagagacagaggaggggatggggggggtggaggagaggaggagggaaaatgataaatgaaggtcttgaagactttttgttcttttaaaattgatgctgtagaagaagagatgttgttgtagctaagataatgattactttctgattcatgaagctcagaaggcatcttgccctccatatgatgaaaagctagatattggtacagcctgcttgattagcagaggttaggccaacaactgactgtcgaaataaatcatgaaaactggggatatggtcacattgtggtcactgaaagttcatcttttaaacttctcttgcgaagaaatgagcccaagttcacgattctcctttcccactcagaagaatgcagtcactcaaagggaaaagtacttacttggggttttgaaaggagaactcaagttaatttttttttcttgatgaaagctatgtcaggaaaggccatttttaccacttcaagttagcttaacgtgggtgatatatcacattgatattttgaagatggatttttcaaggcaaaagcaacattcccactgggagggaatggagttcagaggtgggcttgctgccatttgggggctctcttatccacctcctaacttcgtgctttgtagttaaccttgtgagagagagcagggggcaggaggccttctaacaaagcttaactgtgttaaaataattaattgggaggctatcaggctgaggcagctgcagcatcttgggttcctacgtaagcaaatcagaacccaactcaatgcaagcagtgaaataaaacgtaagcctaaccaatcagaaacagccaactaacctctatctagggactctccactttaaccaatcaaatattttctttgtcttgctttcttaaacactttatgaaaggttctcctgaagccgctgctgtgtagcacccaaacacctgtcatccagtgctgcccagttcatgaactgctgaatgctcaaataacggtgttaacattttaatgcgcctgagtttatcttttaacaactcttttgcttccccttcatctttctctcctccataagaagcttctaatctcaagtgataatatttcaaccccacaatgggaaagagaccagccaccaggagagtggagtagacaatcctgcatggggtatccaggcttctgagcctgaagtaacttcatagagtcccacacacccttcagggttagggagcagccacatgtttgttctcccatgtagcacagaggggagcagggatggagctgagagccagcagacctgatgtgtgaaggccaggatgccaaagcagatacagtggggaccacatgactcaagaccagacagggataaggacacatcactgggtaccagtgcagacctattacatccctatgactgacatctctcaccactaccccactccacccctgccccactgttagataatgggtgtccgaactcagatacctttcctgaaggacactgggaggtggaagaattctagacttaaatttaagaaagaaacacagaaaattcttgaagtgactgagttctcaattggtaagactgtgctttctggtattaagtgaaactgaacctcaggattgagactctagtctctagcaatgatagtaatactataatgattataataaacaaagcttcctttcttgcaaagccaagttacaaggcttgaaaatgggagccaacccccacccaccctacacaccaaatttgtgcagaaatgtagaggctgaaaataaaatgtggatttttattctatagatggggcaaacaaagctcaagtgcgtaaatacttaccctggagtcaccaacatcagacgattaaaaaccaaaacctgaggacagctatttttgccttggctttcattctaactaccatacaagcacgtgctcaatgactatgcaagaagtgctttggcctcagagacatttggagagcaccgagaacaaacatctgtaatttagaacgtttccttggaacagatcatttgagcgttggggtcttcagaagcactagaagttcctttacagaaaccagggtgaaggcaggaactggaaagaggaggtggttaaaagaagctggagttctgagaagcctgtggatccttttcaatagaagaaaataagcagtttcagacaagttctatcttgaaatttccatacagatgcaagttcccagaaagcagcaagttaatcccaacaagtgatagctatagtcaaagcaagtctttttctcctggcaagggggagagggcgtaactacacaattcccatcatttttaaagccatcctttaaagcttaccccaaaattatacacacaccccactcacataaatcaactacagagctcatcaaaccttagaactgagaagtgtttccaaaattatccagtctagggacctcattctgcagataaggactcagacacccaaagacagtgtgccccacccattgttaccaagtcagttagaattgaaaataaaactctggtcttctaattcctagtgcagaccacttttatccattgctatcattctaaaaaaaaaaaaaaacaaaaaacaaaaaaacaaaaaaaaactggtgatgctgtttgtttgtccagtactgactttctccaatatgacagcaggacacagcaaggaaataaaacataacagtgtaattggaaagaggtaagtggacaagagacttcagtcaggtgggcactggcccctgagtgaggaattaagttggttccaatagtctggagcagtggtttccaaatgttttgatcacaagtcattaaaaagtttgggcattaaactttttaatgacgtgatcaaaacatttggaaaccactatatataaaaacatatatatatgtgtgtgtgtgtatacatatatatatatagagagagagagagagagaaacatagcaaaagatagggaattttaaaagatgatatttttaaaataaattttaatagaagttgacatgatacaggtgaatctctataacaaatatatctcccaaatttcagtggcttgacagaataaagtttctttctttctcatgttgggtttggtagagagggcgttggccccttgcattcatttgaggatgcaggatctttccatctcatggccctttcatcctctaaggccttggaatcctcttcttttaaccaaagaatggagaaagagaggaagacttgaggcctgcatggtgcaaggggacttaagacctagacctggaaggggcaacattatggcatcatggctgccctgactccattcgtccaaaggcagtcatgtggtcccagcaagggaggctgggaaatgtagtctagctcatgcttggaaggaaaaggcaatgaggtttagtcaatacacagcaaactctgacacagaaattcaagtctccccatatcccagaaaagtttttgagcactctgcaaggtttcccatttggaaactattagcctggaagattaggcatagactgaccctgtcagcccctattcctctcccacagagcaggacttcctgaggagagccagatttagggctagatgggaagatgttaataatagctagcattactgacaatttaccctgtgtccagcaccaactaagcagtttacacgcattaactcatttaatccagcaaaaactcagtgatgtagatgctattagtatccccattttccagatgaggaaatgaacttaagcccagggagactgagtaacctgccccaaatcacacagtgtcagatatggaatttgatgtccatcactggctctagagtctgtgctgtccatcactaccttgtgctgagtctagagggaaaatgggagataattcccagctctgcaggctttccacaccaggtaaagacaggacagaagagcagcaggctgcggctgaggtgggtaggtgccacgagtggggctgtacagggaaagcagagtcagacagggatagaagggtgggcacaaggtaagtgggagtgaagaaaagtgagcttgcagagtcaggctattggagctcagccatgccattcaggaagcaagtgcagcatggaggactcagagagcccaggtagtgcccaatgcccagaggagccccttgcacgccggtccctgtccttgattaaacttgcaatgacaactgggaagaagtcagcaccacagaggtggccatggcctgcccacatcccaactgctcccagagctcatgcctgtttcatcccaggacaagctcagctactcgcctgccctggcaacaggttccgagtgtcaccagcactgcaacagcccctgtggtgtgctgggtcctccaggctcactctggcccttctgatgccctagccccttgggccgccttctaaggagtccacctgtcctcttcacaccaaacggacctaatttacccaggtagaaaaactctcagtgggtgtctccagggtaccgtccccactgtcaccgcatcatattctaagccagtgggtgaacaacctcggttctggctccccttttaacgtgatcagagtctgcccatgggcaagaaaacagactctgtcagatcatgcattcttgtgttgctcctgccataactttgacctccagcaaatcacccagtgcctcagtttccccaccgtaaaagtagctcagaaatgtgatgactcaagcccccaaagaaattctgggtagttttgtgtgtcttcaacactgctgagtgttttttccaggtggctggatgacaaatcttcctctaggatatgtggggttgtaatttgccctcagagatgcaggtgccccaggagtctcctttaacaaatgaaaagccggtctctgccacatgccaggatgcttgtgaacatcacagaggccacccgaaccctatcacagaccttccctgctctggtggctattaactctccttctgagaaaaacctctgaggatcggagcccacattttgttcagggatccagcctgggctattgccccagctccaggaaagaaggagctgcatgccttctctgcttctattctgattttttttttttttttttttttgaagtggaatctcgctctgtcgcccaggctggagtgcagtggcacgatcttggctcactgcaacttcaacctcctgggttcaagcgattctcctgcttcagcctcccaagtagctgggactacaggtgtacgccaccacagtcagctaatttttgtatttttagtagagacagggtttcaccatattggttaggaggctggtcttgaactcctgacctcgtgatctgcctctaggcctcccaaagtgctgggattacaggtgtgagccaccacacccagcccattctgattttttaaaaactgtcccacatatcaacccaccatgttaccacctgttttaaccaatttgtattggaagtaatgggcagaaagtgttaagctgtgccgcatattatgaaatatgaccagcccaccctggaacactttgcaaggctctatcacctccacatcctacttaacccttatagctgtcccaggagagcccactccctccaccattgtatagacacagaactgctgcacaaagaacagaacataagcaatttggtcaagatcactgaagcaactgggattcgaacctaggacttgcctgactccaaatcccagctattaacacttcactctgcctcatcagggggagagaaaaattacataagccaaggagaggtggttacatggaaagcaaataaagaggagaagtgagtgatctcagccatggaaggttgacaattcaggccatgcaatatatgcttattattatggtagacttcctatttgacctctttgaacttgtgagatcactttaattctataatttacttattcattctttcactaagaatttgctgaaaatttatcatgtgtgaaaatgtcttgtaaactcttttttttttttttccctgagacagagtcttgctctgtcgcccagagctggagtgcaatggcgtgatctcagctcactgcaacctccgcctcccaggttcaagcaattctcctgcctcagcctcctgagtagctgggattacacgcgtgcgccaccacaccaggctaatttttgtatttttagtagacggggtttcgccatgttggccaggctggtcttggaatcctgacctcatgatctgcccacctcggccccccaaaatgctgggattacaggtgggaatcaccgcgcctggccacaattattaatttttaaacctggtgagagatgcaaaagatgtctgcccttaaggaatttataacttgttgaacctagaatacatatttcccttcttagaacaaaaatcaagcatcttctaataaaagtgggaaggtacaggatgtagctaaagcatttctgtcagggttttcccactgtcccttcctgttcatcactgtcccttcctgttgactcatttcaacttgggattcactatgaccactagatccttttcctctctatttctctttaagtccattctaaccacctggacattatttaatcccaaattcacaatgcccaccttcccaatctttaactgacttggtgagctattaacaagagttctatttgacccaacgactcacggaggaaagaagagaacttcacatttgtgggactggccacaatatgcactcaggagctgtaggactaatggccactcctcagagagtccttggggtaagtgaggcataacagagaggctaactatagtaagtaagtgggctgagcctggcctggttgctctcagccttttccgccactcatttccatcaaaagactgcctttaggagcaacggaggttaatgaagctgtccacaatggggcagccagcggtagtgcgactgaagtggaaatcatgtgagttaggtgaaaaagtacaaactggcctgattcagggagctgccacccagctggagaacaggtgttacctctcagtgggcagagctgcacaaggccagatcctctcccttcttagtcacgaaggtgccctctggctccaaggggaggagagggaaccagacctcactccccaggcctcagaccccccatctctctccatgtccttcccgctgtgacctccttcaacggtataatcactcagcctgttaggcactaagtagtaaaactggtcaacctttaaaaccacttttcattacgaaggcccaaaaaaagataaaagatgaaatttaatggggggtgggggggcacaagagggtgattgaaaaaaacacagataatttctggaattggatctgttaagccttacacattagtccccgccctcggaagtaagggcctgtcattctgtaaagggacgcagccacacgcagagaaggtggaggtctccaccccttccctcttcgtcctcgcctaggagggaccgtggtgccagtaaaacagggactggctggcccagagccttggggatcccctcctttgtctggaaccctctggctcaccgcatccttcctcggggccgcatggccctgccccacaaagcaggcgtgctgggggctgcttggccaggaaagcggacgcttgcagggaccacgctgctgcctctcttctgcccttttccccttagttttacaagttccctgttcgttcgttctttctctctctcctctctctctctttctctctcctctctcccgtctctttctctccttctccgtcactctcttccctccctctctcctctctcctctctctcctctctctctctctctctctctcctgcgaggagcttcagatttgtgggttgtttttaatgcattccggatgccagatgaaattttggcccgggctcaccagttcctctgctattgggactctccccacctcccctccaggcccaaagccgcaaggagagaaataggcgggcgggcgccatctgttggcagttgcctggagccgcacgaagaggtggagaactaaggcggggcgcaggtttccagtaaagagctcgatccgtgatcctcgtgaaagaattaatgtctacctgatgaaacttcctcgagggatggcccgggcagcggctcacgcctgttatcccagcgctttggaaggcggaagcgggaggatctcttgagcccaagactttcagaccagtctgggcaatgtggcgagaccgtctctacaaaaaataaaataaaaataaattagccaggtgtagtggcgcgcctgtggttccagctacttgacaggccgagatgggaggatcgcttcagcccaggaagtcgaagctgcaatgagctgtgaccacgccactgcactccagcctgggcgacagagcaagaccatgatatttcaagaaaagtccttgaggcaaaaggtgacctgctttagaacgcctcagtgcttagacatgaacagtgaaggggactgaagattgttggaacacggtgcagaaccctcttagtctcgttttgttgccttattatgttctatttcaactttcaaaaaaaattgctggcattagcatgtcgaaaaattggtgacattagaatgtcaaattctttgaaggatggggatttttgcattcagttttgtgttcaccaaaataagctagcaggagattctgtgcaagttgacttataagtatatggtttgctgaaatcttatgaggagagggaaatgtaaagtaaatgaagtggaaataagtggttgttatggttaggaaaaggccatcgtaaggcttcatggctagcatgcaggccaccgaagttctatcccaaacagaaggaagctcttgtaggatggtgagttatggtagggttctaggaggagtgggtgtcagccttttgggagggggaatggaagggctgggaagggtgggaggaagtgaatgaagttccaaagccaggaagctaggcacaaccctgtgagtagtaccaatacctaaggatggtttctcagggacactcagaaaaaagagcccagtctcctgagagcaagcatgcagccctatccccacattttcccctgaacatggtcctgtccaccaaatcaggcctgaggatcctgaaacacctccaggccctgggccctcacccactagacagcccaggaaccaggagcctaggcctgaataatgggaagctctggtactgggctttatattcctgcattttcaacaggaacaagactatgatgtgtggggtttcacaccctttctccctcccttttcctctcagagccacctttgtctttgccaatttgtccctggggtttggtgacacagaggcagtggccagaaaagagaggcagaattgaagtcgtggtcatggggcttttgcttctggacaaggctaagatttacttggatatgaacataaaaataaggagttgctggaagagaagagctgcgctttggatgggtttattaagagttgagagcgcggaagatgaggcagctttggaaatcagctgcagtagcatgaaggatactgagaatcattttaataaagacaatttttttttaagagacagggtctcgtgctttggcccaggctagagtgcagtggggtgatcacagctcactgaagccacaacttcctgggctcaagctgggactacaggcacgcaccaccatgcccagcacatttttaaaatttttttgtagagacaaggtctcactatttggcccagcttggtctcaaacccctagcctcaaatgatcctctctcctcagcctcccaaagtgctgagattacaggtgtgagccactgtgctccacggaggatgaggtttataaggtgatttctggtgcatcaagaaggtattttcctcccctccctctgaccttcaggggcttcttgagggaccaaaacttggaaggtactttccattgatcttcttctggaagaaggagagggtccaataaaaccgctgtttatttgagtcagcatcatgcacagcccaggccacacagacccacagttatatactgattacacattcaacgcatgtgtgttctcaacactgaagaggtagtggtaatgaaggcagccatggggctatagtcctagacattttattcctttaatatttaaagcaaacctatccagcaaaacaaaggaggcaaaacaaaacaacaacaacaaaaaaaacccctgcatgtcagtgtttagaaaatatccagactatatgtctttccaatattcatggaaatctttgatccaaggtgatgttgatgagcctgtgggtgggctgggagtttgttggtggacctacaaggctgtggagcacatgtcaattctcccaccagtctcaggcagtgacgcctactggtttagagcacagattctagatcgagacattcctgggttcaaatcccagcactgttgtttccttcctgtataactcaagaaagtcttggcttttgcagataccaccgccaccgggagccccatactattgagaggtgacagcgtgctggcagtcctcagagccccgcttgctctcggaacctcctctgccagggctcccactttggcggcacttgaggagcccttcagcccaccactgcactgtgggagcccctttctgggctggccaaggctggagcccactccctcagcttgcagggaggtgtggagggagaggggcgagcgggaaccggggctgcctagggcgcttgcgggccagctggagttccgggtgggcgtgggcttggcgggccccgcactcggagcagccggccagccctgctgccccgggcaatgagcacccgggccagcggctgcgtacggtgtactgggtcccccagcagtgccagcccaccggcgctgtgctcgatttctcaccgagccttagctgccttcctgcagggcagggctcgggacctgcagcccgccatgcctgagcctcccacccgctccatgggctcctgtgcggcccaagcctccccgacgagcgccaccccctgctccacagcgcccagttccatcgaccacccaagggctgaggagtgcgagcgcacggcgcaggactggcaggcagctccacctgcagccccggtgcgggatccactaggtgaagccagctgggctcctgagtctgatggggacgtggagagtctttatgtctagctcagggattgtaaatacaccaatcagcaccctgtgtttagctcaaggtttgtgagtgcaccaatcgacactctgtatctagctgctctggtggggccttggagaacctttatgtctagctcagggattataaatacaccaatcagcaccctgtgtctagctcagggtttgtgagtgcaccagtcgacactctgtatctagctgctctggtggggccttggagaacctttatgtctagctcagggattgtaaacgcaccagtcagcgccctgacaaaacaggccactgggctctaccaatcagcaggatgtgggtggggccaaataagagaataaaagcaggctgtgggcgccagcagtggcaacctgctcaggtccccttccacactgcggaagctttgttcttttgctctttgcagtaaatcttgctactgctcactctttgggtccacgctgcttttatgagctgtaacactcaccgcaaaggtctgcagcttcactcctgagtcagcgagaccacgaacccaccagaaggaagaaactccgaacacatccgaacatcagaaggaacaaactccagacgcgccaccttaagagctgtaacactcaccgcgagggtccgcggcttcattcttgaagtcagtgagaccaagaacccactagaacacactatcagccgtggtcaaccccaccatgttcttcaacatcgccatcaacggggagcccttgggccgcatctcctttgagctgtttgcaaacaagattccaaagacggcagaaaactttcatgctctaagcactggagagaaaggatttggttataagggttcctgctttcacagaattattccagagtttatgtgtcagggcggtgacttcacatgccataatggcactggtgcctctacggggagaaatttgatgtcgaggacttcaccctaaagcatacaggtcctgacatcttgtccatggcaaatgcaggacccgatacaaacggttcctaatttttcatctgcactgccaagacagcgtggttgaatgggaagcaggtggtctctggcaaggtgagagaaggcatgaatattgtgaagcccatggagcgctttcggtccaggaatggcaagaccagcaagaagatcaccattgctgactggacaactctaataagtttcacttacgctttatcttaaccactggaccattccttctgtagctcagagagagcaccctccaccccatttgctcacactatcctgtcatctttgtgttcttgctgcagttccctttgggttccatgttttccttgttcccttccatgcctagctggattgtagagttaagtttatgaatatgaaataaaatctaaataggccgggcgcggtggctcacgcctgtaatcccagcactttgggaggccgacgcaggcggatcacgaggtcaggagatcgagaccatcctggctaacacggtgaaaccccatctctactaaaaatacaaaaaaattagccgggtctggtggcgggtgcctgtagtcccagctactcgggaggctgatgcaggagaatggcgtgaacccaggaggcggagcttgcagtgagccgagatggcgccactgcacttcagcctgggtgacagagcgagactccatctcaaaaaaaagaaaagaaaaaactaaataacaaaaaaaagaaagtctatagcctcttatgcctccatcgtatctgtaaagtggggataaaaatagtaccactcctttcgagttcatgtaaggagtaaatgaatgagtaggtgaaagtgttagcatagtgactgccatattgtaatgtttattaagtgttagttactagccaggcaaggagaatcatctcttgacataggcaggctcaggacctttgtaaatacttgtggtctgaccattcagtcagatcaacccagaggccaagctgcatatgcgtcccatggactgactgcatccctaggaggtactcctctgctgggttgaaggcatctctcagttggtgaggactggctccatgacctccacctgaccctggtgtactctgattctcttgcccacctccctctaacagccaccccacctgcccctcattggagatgagaaaggaaggaaaaacagagctgggcttctgtggtctttgtcctgtccccaaagccctctggaaggaatagagagaaatcataggatgaggctttctactcagaccccatgtaactgcccggccaaaatgggccaaggtaggcagcatcccgctcaggtcctgcagatgctcacacaccctgctcccacctggccaagagcacccctcctgttcctcggaggactggggagtcccaacttccagtcgctcttcccttaggactcacatgcctttgctcccctccctgtggcttcgctggtgcttctcaccatacccaaagctccaccaccttactgagtcacgcatttacattgtgcagtactgctctgggaccaggaaaatgacccactaatagcttacaaacgagcatgggccaaggtatggttgtaatgtttaaaaatacttctgggtatttctggatctacttcttggtcttgtctcttatcgctatttccttccctgtgttcctcatgcctctaacgtgaagagcaacttcactgcagccccagcctctccagtgtctagacagcaccctggtaaactaggggcacttgccagggggaaagaccccgatgagtcactgcactggggacagaaaatgttctgacttcagtttttatttatctcattttttaacttctattttggggtatgttttagatttacatgaaggcacagtaatagctgtttacattagtaaataaatatgcagttactgaggatgcatgagcaaatgtggaagggcacaattttaaagatttggcggccaaagtcctggcccacagcgcctgtctgtcattctctgatctggtttcagggaggttttcttgctatatcagctcccagggttgtcctccaaccagagtaataaacacaacctctaacagagggaggcgcctggcaccaaccaaccagtcagaaggacctggaggctctgggttcagcccacataaaccccttagttgctggaccaaggggaggtggtagggggacagcccaggggacaggatgcacttgggaggcctggagcagctgctggctacaactagtcaggaaatactttagaaagttgacagccaggagtgctgaatatcagcgctgaccgcaccttctttccaagtggtggttcctaccagctgcacctttgcgagtttcttggtctttgcttatacagatccctgacagtaaaatgcccttccatccttcctctgcctattaacattccattcatctggctgggcacagtggttcacacctgtagttccagcaatttgggaggccaaggtgagagaatcgcttgagcctaagagatggaggttgcagtgagccatgattgtgccactgcactccagcctgagcgacagagcaagggaaaaatacagaaaaatccactcatccttcaagctctagttcagatcctcccctatcagggagacccctctgatgctccaggttagaaggaagtgctccttccctggctcacatggcatgctctcacttggctcttactgtgctcttgcctcaccctgaaggcagactgtaagttccttgaagggagaaactattatatttcaacaaacctaagatgccatggttgtaaaatgaatcattgtttcaagtacctctaaaaaagaaaagaacctgccaatgggctatgagtggtaagacataccctgatttcggagacgttgacttttttaaaaaaacagcaaaagtgctacttagaatgaatgacatgtggtggccagctggcctgtgtctctgcatcgcccatgtctagaattgtgtttgatttgcagcaagcattcaggaaatgtttctgtttgcttttttcggggttctagtgaggagttccagaggaggaagtagagaagagagctgggctggaggaagatgatggtgagacccgagggactaagacttgagctaacaaacaaatcaacaagaaataagcaaacaaccacataaaaagtgggcaaaggacacgaacagacacttatcaacacaagacgtacaagcggccaataaacatgagaaaatgttcaccatcactaattatcagagagatgcaagtcaaaacctatgagataccatctcacaccagtcagaatggctactattaagtcaaaaaataccagacgttggccagtctggggagaaaagggaatgcttataaacggctggtgaaaacagctggctaagagcccagttaccttagtcatagttccaactctgcaatggcctgtatgtcaccaaaaagccactaattcctctatgattacccatattaaatgagacaataggataataataactaccatttaccaagttctagcaacatgtcagtgcttttatacatattcatatattttcttaaacaaacagaaaagcagttatcactggccctttttatttttaaaaagataatggggccaggtgcagtggctcatgcctgtaatcccagcacgttgggaggccgagggcagatcatgaggtcaagagttcgagaccagcctggccaatatggtgaaactccatctctactaaaaatacaaaaattagttaggcgtggtggcaggtgcctgtaataccagctactcaggaggctgaggcaggagaatcgtttgaacccgggaggcagaggttgcagtaagctgagattgcaccattgcactccagcctgggtgacagggccagacttcgtctcaaaaaaaaaaaaaaaaaaaaaaagataatggaagaggcagccacccacaggtcatgggaccttagacaagccccttcctgcatttcatagctagggaaacaggatcataaatgttaatcacaggtacccggtctacagtagagaggttttatgaaaataaaatacaagaccaaattcaaagagctttaaaaaccacagagccagacaaatgtgagaggttattatgagcaaacaatgacattacagaagtgaaagtgctcagtgccatcaagaacaagggctctatttcactcccatgtgtcaccataataaagacagagtccctgatcttaaaggcatcaattttgccccactggaagccttaattgtaattcattaatacagcagcatcctaaaagttactgccgtttctaggaatccaaacaactggttttaggtcctaaagaatttgaatcattaagaaatttaaagtactagtagagtttctgggagccctacaattttaggtttctgcatggttaagaaactgaaagagatgatttcttaattggttccattttcccagttttttttgttctaatccaagaattgttccagtccttatccttccttcaatcagaatgtccccaagtttatggaatgggcttcccttgtccccactcaatggctcaagaataccactgttatatattttttcctttcaattgtgtttcgtgactctggaaaaatactggatactttcaatatctaatgtgatatgatctcatgatagtttcatactatttttgatatctaatatgtaaaattaagtaatctgatagttctaatgtttacttgcagagaaattaattatagaagtgccaggaagattcaaggaattggaaattatggtttaattagtgggtatttagaacagctcttctcaaaaatcacctggacaacttgttgaaacacaggctgctgggtctcatctccacagttgctgattcagtagatctgagtggggcagcatgatttgtacttttaataactcccagggaatggtgaaggctgcttgtcctgggaccacacttgagaaccactgatttacatggttattggaaggaccaagaaagacaaaccacagaggcctcctcttctgtctttcttgggatgtgggttgctctgatgttgaagtggatggggttaggaagagactgggaaagacactgtaagccaggatgacaggtttcatttgtaaaatctttaccagagttttcttctttaatccaggctttatctcgtgagcaagaaatcatgagatctaaagtccttctggcaagaccaggctctaactctctccatatcaccctgggatcccaaaaggaccttccataagaagacacaaaggggacaagtctacagggggaattcaccaataccagtaactatgacaacactcaaacaatccctgcaatgttcgaaggttcataagaaaggagagtctgttgtcccatctggtgaaatccagtccccaagtggaaagcaatctctgttgccacaatccccaaactactagaagccatgctctctgctttgcatattgctggcttcacgaacatcatatatatatatgtaaattttaaatagccgatagaagatcattgatacatctttattacagatatatagttcagatcaggaaatattaagttaccaactcctaaagcagccattgtatttcaagcaagtcaatcctactaccatgaccaaacctaattggaccaaagaaagatggctgattaaggactatgtcaaatcaaaagggagatgacccatccatccccatggagtccccctgcttgggaaggctgaggacatttcacatatgggctatgtaggaccttaggcaaatcccctctcctccctgggctttaatttcttcttctagaaagctaggatgctagatttcattctctcagaagcacttttggttctaacggccataaacacagtaactttctgttcttttgcatgccactcctgggccccttctctttgtactatgcgaggaacttgccccatcatcagatttgagtgggggagtattgggggctccagaaggccaggaacagtccttaggaagccaaggcagacttcagaatatacggtcagactcaaatggcaaggagcttagacaatgtcacattgtggagtttaaaaacatgcatttttaagagcctgggcttactgagtcagcaatctggaacattctcaagagactaaaaatatcctgaaagtggactgaattttaaactaggctttaaaaaactttctatgtgaaaacaattgagtatttcttctttaaaacagttatccgttttctttatttagattttcacaactggaattgataagtatagaggaagctccagcctgagatgggggattgaacgtcatgtttgaagggctgtccagtcctagcgtcgatagcaagggaccaagatttataactttaaatctctcaagccatctaaaaagcaaagaggtaaaatgctttctcttttctttctgacagtttgaggattctctttcacagcatcaaacagcaggacaaagggttcttttcaaccaggaggttagtatccaccaaatgcttagctcttggcattgcctggctttccccagcaagacatgagcagcagatctgtaaacagtctgaaacatccagtaaaatggatacctgagtccctaactatcaccaccccaccggctccatgcaacctttccctaattcacattaaaataacacagaaacatagaaaaggcagtgaagtaaagccactgtctgaatctcagcatagggcagaagaagctggatgtagaaagtgctttccatgattttctcaagcatgctctgaatgcaggggcggacggtgagggaggcccagagacccagggcctgtcactaaccagaaaaccacagcattgagaagcatcctccgcacgcttccaagagaacgttcttatcaccgttcatggggtgcagctatttactctgggctacttgcttaggagcagaggctggactttcaaggtgaatatggcccatcaatccggcagcaaacatactttttaaagctaagaatcttctttcgagttggagcagccttttcaactgtcctgcctcagctgggacataacaaaataccatagcctgtgtggcttaaacaaatcaaacgacaagtaagtagggacacttcaaaagaacaggaaatgtttctaaacagacactcaatctttaaaaatgaatcttaggatttctgttgtaacattaaacacattacctcttttcaacttagtactgcatgttaaaatgtttgtaagacctatatagctttctgatttatttacttggttaaagaagcgtgtgcatgctctggcatttatttattacttttaagaatgacaaaaaggctaaactgtatgtgacagaaaacaaacagcatgaaagaaaggaaaaaaatggaaataaggagcacaaaattccaaaggtcagggaaataggcaagctgacatcagtgtggcagagtataatgtaggcaatttatggcaaaactggtaaaacggagagagttctacaatgtaaacgattggggtcaaagattaaacacataaaataatacaaaatcttgccatgtcaaaaagggttcactctactcagcacttgagacctctcctgttacaagggctacttacaggaaatacacatgaaacaaaaagccacagaggacaacacaggtgtgaaactgagcaatgggatccaacctgagccccttctctggaggatgagacaacagggaagtgcacatggctgtggcaaacaccatgagtgtgccacccagatccccgcggatcccttttacaggttaggggcatctttcccgagcttcagtgtgctttaggtttccaacagcccagaagtgcaactccttttttcaggattgtctttggggtaccggaaacacagctgccagaatacacaagccggaggtggctagggtgcccatacccacagtgggcatggccctgagtcgatgactgacagatgtgagagcaagaaagccctgctccctgagtcccagggacaaaggaaaaacgtgcaaaggtataacgtacactccagagtctccctgtgcaatccagaactcagcctggaaccccctggaacttaacctaaaattacaccctcctacctgatgctcccccaactcaactttactctcatggaaccagaaataaatcatttgtgtaggaatcctcatgtaagcgtctgctcctgaggacctgacctaagacaagcacccatgtgaaccaggcaccgggccaggcgctgttggggaattaacccctcagaggggaatcctgcctccactcgggaaacatacaggcccagttgggagcctgagacgtgagcaatgaaaaatgaactacacgagatacgattttcatgctgaaaaagtactttggattcagaggagagtgcaaatacgggtatcgttataaattgtttttattagtggagaatcagaacccaggaaggccaggtgatagaggacaagtctctgaacaccacagccaaggaatggagaccctaatgatcctaaatcccagctttcaccacgcgcttcccttgccctagggtctccaaatgtcttctgggtggattgcagacccgagcaagatgaatgaatgatgggcacagtgatggagtttggatctgtgtccctgcctgtctcatgttgaaatgtaatccctaatgctggaggtggggcctggtgtcaggtgattggatcatgggggtggcttctcatgaacggttagcaccacccctagtgctgttctcctgatggagttaccataagatctggttattttaaaagtgtgtggcctccacccactctctctgtccttctcctgccaggtaagacgcgtgctccccctttgccttctgccatgagtaaaagctccctgaggcctccccagaagcagatgttctcatgcttcctgtacagcctgcagaactatgagccaattaaacctcttttctttgtaaattacccagtctcaggtatgtctttagagcaatgagagaacagactaatacacacagcgaggccaaaggccacctgccgcagtgcacagccaggaggcgacagcaagaatggagaagaaatacaggggttggttgtgaaggaaatctaagggacttggtaacggatgtaacggggagcaggaagagatggttagtacattagtcagctcaggctgtcataacaaagttccttagactgggtggattaaacaacagaaatgtgttactcacagttctggagactggaagcccaagatcaaggtgtcagcagggctggtttcctctaaggcctctctccttggcttgtggacggcatcttcccccttcgtcttcacacggtccttcctctgtgtgtctgtgtcctaatatcctcttcttatggaacaccagtcagactgaattaaggcctacccatatgacctcattttatcttaatcatgtctttaaaggtcctgtctccaaatacagtcaccttgaaaagtaatgtggggttaggacttcaacatatgaatttgggggtgggggtggacaattcatcccttaagagttagcaatattatggtaggtttgattccagaaagactgtgtttgaggtgatggccacacatcccaagtatgaacatccagcaggtgtatcacagacctgggcataaacttcaggagagaggccttggctacaagagactagaagatcctgcttgtctgccctacttcagcagggcatcccacagtgtgtgctgtctgggaaaagcacaggcatggcatctcaccctaggtgtgcaagctcagaaactcaatcatatctattcaagtggtgagcaagccccccatcagtcagttctcttgctgagccaacccaaaagaggctgctttataaaagagagtgtctatttaataatttacccacagagattcctggcaggataatgcacaccagtcatttccatgggacatgcctttttgtggactacttggctgtctaccctttccgcctccctgtcaccccccaactgataataagctttctgtggcttgggactatgtcccactcaatttcatagccctgttcattcagtcctaaatgtaccttactaatatgtgtatcctcccagcatctaacacagtttctttcagggggcaggtggtcaataaatacgcatcaatagttaggcagagaaatgggtactgatctctaacaggtgcacagtagttaagagcacagacttctatgatctgcatcttgtctttaccaagtattagctgtctgaccctccctgagtagaattagctactccatgcctcagtttcctcatcttatccaataagggtgatacttttatcatccacctcatcaagttgttatgagcattaaatgagttaatatatgtagagggcttggagtagcacatggtgcacagtcgacctatatgggtgctgggaattgtttatatccatcacttgcttgacacattacctaggttgtctcattaaacctccaaacaatggtttgaggtggatgttgccatcccaccctaaacaggaggaagccacatccgataaaggtaagtaacatccagatgactacacagctggcaggcggcagaaacagaaggtgagctcagaagggctgagtctcatgcccattctcttcccactgcaccataagagaattctcactcaagaatgttcccagcctcagccagatgcggtggctcacacctgtaatcccagtattttgggaggccaaggcgggaggatcatgaggtcaggagatcgaggccatcctagctaacactgtgaaaccctgtctctactaaaaatacaaaaacaattagctgggcgtggtggcacgcgcctgtagtcccagctacttgggaggctgaagcaggagaatcacttgaacccaagaggcagaggttgcagtcagccgagatcacatcactgcactgcagcctaggtgacagatcaagactccatctcaaaaaaaaaaaaaaaaaaaaaagaatgttcacagcctgtcacagagaacccaataggcactaagagtcaggaggtgaagccaatacagcatcaagatctacccaaatataagggggttcagagatgtgattgtgtcccaaactctaccctatatggttgcaatgctacgtactgtatcaacggcacatccaagctaaaaagcttttcatgtgcatcatccagaaggcgtccctagcattcaggggcccaaaatgtcccccttggcactcagctgaaccatcagcatgccagcaatacctatgtaactcctacatctggaaagcagatgacagctgggctctcagcagctggtcagcaaagtagactgtgactaggacaggttgtcactgtgccttagagaatcctaagcattcctttagttctgggatgacaaacagacagtgtctgtgctaactgtaattaattaaaagtgattgtctagaatctgtgttttccaaagaattccatggctaagactgggctcagtagagaagagctccactgggctcagtagagaagagtttcatggttgactagtgatgtctgcccagaatacaagagggagaggagaacactagatgaaggttttccaacccttcctcaggccaagtcaccttgtgatatggtttggctctgtgacctcactcaaatctcatcttaaattgtaatccccacgtgtcgaggggggacctggtgcgggtgactgcatcatgggagtggtttccccatactggtcttgtgatagtgagtgagttctcacaagatttgatggttgaaaggtgtgtcgcagttccccactctctctcgctctcctgccatcatgttaaatgtgccttgctttcccttcacctaccaccatgactataagtttcctgaggcctccccagccatgcagaactgtccactacaccgcttctttttataaattacccagtctcaggtggttttttatagcagtgtgaaaacagactaatacatctttcattcacttaggtattgaagaagcacctggtatccacatactaccatactagaacatgaaaacatgtatatgacatggtccctgccttcaagaaaagacacacagaggtgagaagccaaacaaaaatataaatacaagccaagcatggtggctgctgactgtaatcccagagctttggaagggtgaggcaggaggatcatttgagcccaggagttcgaggctgcagtgacccatgatcatgccactgcattccagcccaggtgacagagtaagaccccatctcaaataaatatacacacacacacacacacacacacacaaattgcgtgttaagcatggggaaaattctcttttaaaaccctgtctactcagttttttaaaggttggggtcttcaaggactcatttttctcaacatgccttaaaagtactgtcagttggtggccaggcgcggtggctcacacctgtaatcccagcactttgggaggccgaggtgggtggatcatgaggtcagaacatccagaccatcctggctaatatggtgaagccctgtatctactaaaaaattagctgggcgtggtggcaggcacctgtagtcccagctacttgggaggctgaggcaggagaatggcatgaacccgggaggcggagcttgcagtgagccgagatcgcgccactgcactccagctggggcaacagagcgagactccgtctcaaacaaacaaacaaaaagtactgtcatttggttaacagctgccttttatggaggccaagctatgcaaaccaaactatgaaaaactttaagagtaaaagggaccctggatgccatttagcttggtcacttgccactacagaagctccttcagcaacaacccagcatgcttgctcagtgccttcatcctccagctgaggaaggctgcccactccagcctgatcaaccatgattgctagaaagtgtttccttggatttcaccaaaatcctctttctctcatttccatccagctgtcctaaactctgtctttcagggccatacagaacacaaacaacccctgctcaacatgacagtttttctaatctctaaagacagttttcatattgcccctcagtcttccctactgccagttaaacagcccaggacttctaactattttccagatgacatggtttcagatcacctaacgtcctctgggttcccttttttgggtcatctttcatcttctcaactcagagaggattttaggctctatttagattcctcctcccttatcctattgtcagaaattgcctccaggtagaaagccaaggcaattatagggttcttttcacttatgtccattttcccagggatcacaaacatgtacttcctgaaataagttattttatgtatcttgtccactttctagttactcacagtgggaggataagtctggttcttgttatcacattatggctgaaagtggacatccacacatgttcaaacaaagctttcaacattttaccattaactgtgatattataaatgttccccttaacactgggggcaagcaagggtgcttgataccaccatgtccttacaaaattatactggagttcctagtgaacgcagtaacgcataaaaaaacatgaagattggaaatgaaggaaaaaaaatctgtcatcatttgcagtttgcatgtttgtctagataaaaatcccaaaatatctacacaaaaatcctaaagtatatacatttaaaatgaacctttaaaaaaatgtgatggcataaaatactactaatgatagcaacagaaaatgtaaagtacccaaaaataaagctaaccacaaatagaaaagacctctatagagaaaattataaaaactttacttaaagaaatcaaggacttaagagacatacaatgttcatggatcagaagattcaatattacaaagatgagaattccccccacttgatacacggtttcaatggagttatgatcaaaattctggcagagcttttttggtacttaacaagttgattataaaattattataatctggccaggtgcggtggctcacacctgtaatcccagcagtttgggaggttgaggcaggcagatcacaaggtcaggagatcaagaccatcctgctaacatggcaaaaccccatctctactaaatatacaaaaaaattggccaggcgtggtggtgggcgcctgcagttccagctacctgggaggctgaggcaggagaatgtcgtgagcccaggaggcggagcttgcagtgagctgagattacgccactgcactccagcctgggcaacagagcgagactccgtctcaaaaaaaaaacaaaattattataatctctactaattaagttagtgggtattggtatagggatattcaaatagagaaatgtaactgaaaagagaggcatgaaagagaaccacgtatatagagaaacttagtttatgatggagttggcattggagattaatgtgaaaaggacagatatttcagtaattggttagccacatgggaaataaaaagaaatgtgattctgtgttagccatgttgctgcaattttgctgtgcagcaaacaacttccaaatctcagtaagatataacgacaaacatatatttgtcacacagaggtctataagtcacacagaggtcagatcaggtctactccacatgtctctcattctctgacccaagctgaaggagtgtggccacccggggcatgcacttctcatgttgcaggtaaggaatacacgagagtaaatcaaaccacacatttaaagtttcttattgggtgggacatacattatatctgctcacattctaatcaccaaaacaagtcacgtggttaagctaaaagacagtggggaagtggagtatattctgctcaaaatgaatcatggcacaggcaggaaggaaagaaagaattgtgagcaaataatacaaattactacagattctacctcacaccataccaaaaaaatcaatttgaggaggcttaaagacataacttatgaaacatttaagagactatataggagaaaatctttatgttcttagagtaaaaaggaaattcacaaatatgaaacataaaacagaaactataaaagactgataattttaattgagctgctattcataagaaattcaaagtgagataagacattcacaatatatatcagtggcaaagaattagcattcagaaaacacaaagtacccctataaataaataaggaaaaaatagacctattcacaccaggaacttggtatttgacagaatggcatcacaaatcagtgaggaaaatctggattattcaatacagggtgctgatacaactggctgtctacatggggaaagataaaatgagatccctacttcagtctatatgccaagataaattctagataattttaaaagataaatatgaaaagcagcattttataactttaaaagaaaatgcagcatatcattattacattgatagtgttttcaatgaatattgaaaagagaagtcataaaagttggtaagtttggctacatttttaaaaaaacttatataagtcaaaacactcctggccaagcactgtggctcacacctgtaatcccagcacaatgggaggccaaggtgggcagatcacctgaggtcaggagttccagaccagcctgaccaacatggtgaaaccccatctctacaaatatacacaaattagccaggcatggtggtgcacacctgtgcaccaccagagcgagattccctctaaaaagaacaaaccaaacaaacaaaaaactccctaaacaatgttaaaagtgaagttatagagcagaattttttttttttttggagacgtagtctcgctctgtcgcccaggctggagtgcagtggtgcgatctcggctcactgcaacttctgcctcccgggttcaagtgattctcctgcctcggcctcccgagtagctaggactacaggtgcatgccgcccggctaattttttgtattttaatagagatggggtttcactgtgttgcccagactggtctcgaatgcctgagctcaggcagtccacccacctcggcctcccaaagttctaggattacaggcatgagccaccccgccaggccttttttttcttttttttttctttttgagacagagtctcgctctgttgccaggctggagtgcagtggcacgatctcagctcactgcaacctctgcctcccaggttcaagcgattctcccgcctcagcctcccaagtagctgggattacaggcacccgccaccatgcccagctaatttttgtatttttgtagagacgggtttcaccatgttggccaggctagtcttgaactcttgacctcaggtgatccaccccctttggcctcccaaagtgctgagattacaggcatgagcactgcacctggctggaagattttttttttttctttttttgagacagtctcactctgtcacccaggctagagtgcagtggtgcaatctcggctcactgccagctccgcctcccaggttcacgccattctcctgcctcagtctcccaagtagctgggactacaggcgcccgccaccatgcccggctaattttttgtatttttagtagagacggggattcaccgtgttagccaggatggtctcgatctcctgacctcgtgatctgcccgcctcggcctcccaaagtgctgggattacaggcgtgagccaccgcgcccagccgccagaagatatttttaacatgccaagaagacaaaggttaaatatccagaatatttcaaagatgtcctatacgcactacaaaacactgctgaagagagcttggtgcatttgaagaacaacaaagtgtttgttgtggttgtagcagagtggggtgtgtgtgtgtgtgtgtgtgtgtgtgtgtgtgtgtgtgtgtgtgttactcccgtctttacatgataaattcctttgacttagaatgccctttcaccattttgttcctggagttagaaactacctcatgaaaattagcatgaccttcctttatgcttctctggtttgtattatattctctattgacaaattttaaaatattataattcattgagagtaccattttgcctccccctactccctactccaaatatgagtttttcctgtttgattaaacagccattgagcatctgtcacagatccagctctgttctaggtactttagaataaagatgaatgcttggttgtttccaggctatgctgtaaattctaaggaagggggttaaggacaggattcttggaggcagtatgatgtgatcccagagacaggagataggaaaaagataagcacatgttctagatgtgtttaaattctcatcaaataggaggcgacgccattctctgatgaggaaggagatatgaaatcagacacccaaagaggctttccagaggacatcctaacttttgatagatgtttccaccatctgggtggtgtcctcttctccatccctctgttttctcagaagcagctgctggggtcccagagggatgcacacagtggctataggtgctcacagatccacagtgaaacactcttatctaaccctggaaggttttgctgcttgaaaacctttatgccttcatcctaagatacaaggttgcaaatagcaccaagagctggaaacagatgccagctgaaacctaagaacagacacagtgcatgagcagtgtcctaccaggaccaccactcggctcttggcagtggcagccctcctcctggcttctggcaatgaccatcagttgcttcatcttctgaaaaggaaaactacccagttggccaagccagatctccaggaatgaggtgtctctgtctcctgctttgagatcagtccttccactgctccatccagggagccccagagaaagtaatgtgtgagttgaacacactggaaatctgtacctagcacaggtcagcagttgaaaacagcatgtatacaatggctttcacctacactgttaaaaggcgggcacatgcccaataaatgtttattgagtgccattaggtgcccggcactgggtcatgcactgacaatgggaaggcgaatgacaaagataggcttcctgctgtcatagcgtttacagacagctggaagcgtgtgatggttaattttttgtgtcaacttggctagtactgagttatttaatcaaacactaatgtaggtgttgtttgctttgaagctattttatagatgtggctaacatctacaatctgttaacactgagtaaaacagattgctcttttactgtgtgggaatgtctcagccagtcagttaaaggccttatgaacaaaactaagattttcctgaggaagtagaaagttgacctcaagattgcaacatcagctcctgcttgagagttccagcctgctggcctgccctacagaatttggatttgtcagttcccacaactgtgtaagccaactccttgaaataaatctctctccgtgtgtgtgtgtgtgcatgtgtgtgtgcatgcacgcgtgtgcatgcgcccacgttcatctctggcacgagacccacatacaaaggtggtgtcctaaggtgtatgattggggaaactgcatgtggtgcttagcactgtaagcctaaggcagactgtccagataggaaccttggatccatcatgtactagatgcaccatgaccttgggtcaactcctacattctctaaccctcagtttcctcatctgtaaaatggtggtagtatctccctcacacggtcattgcaaagagtcaaagagattaagtatctcatgatatttaagaagttaaatgcccatgaccaacacagcaagtaagtatgaagccaggatttaaactcatgtttgtctgcactgcgtatgccctttacccgctgccatatcaccttggtctttgggaattacacttcagttatcagctctttaacagacacagttgctgtagaccactcctacattgttacagcttcaactctgctctacagagatgcctcttaaatgtatacctttggcctaatcctgaggttgagttccaggtttccactgcactttgctaatttgatatgctccattggcttcaaatctgacatatcttaaattcaagctcatcatcgaagcctcaccattgacaagtcctggcttcacctctctctagttatatgaccccaggaaagctactgatcccccaatcctcagtttcctcacttgttaaatggcagggtttgccgagatcaggaagccagacacatagcactcatagttcttcttatgtctgactgtgtctacagtacctgtcttgcttgatctctggtacattgtgggtattatattgtacttatttattcagcatctattcattccctggcactgattttgactaatttcacaataagatgcatggatttagtcctaactcaccacttgtaggaaaaccatcatttcttactaaaccaagtaaattggctgctccagtatgcgttggtttcatttacatcatatgttagtatattgccatctagaggaccaagtgcaagctacaagcaagagagaactggggcttggggagaaaggcaacatcctagaagaaatgtttaaaaaacattaagactcattcgtagctgtgttggatttcaacaattatgtgaaaaaaataaataacaggatgtgttttaactataaattagaaatgaatgctatagtaagttaccggctcataaacttatgatctctgttaaataaaatttataggaggtcattggtttgaagtaagttcctgcactaggccccagtagaccaaaccaaaatggagttactcacggtaaagttccaggccaccaagccaaaactacattgttatctgaccttccaagaaatcaggagcgagagggagataatagccacatctccgaacagccagttttagcctgcctgataaggaagtccccctactttaaccttcacaaggaaagtaactttgaaaaaaccaatccactttgtgttctttgtttctgcattcttcagcctttttctgcctgtaaatactcactgcccatgtttcagagcaaagcccaattcccatgaatcattctttgctctgttacatttattttgtttaaagttttacttctatcatctttaacttgttctaaacaaaataaaaaataaaatgaaatcagcattctttcctataattgactgttttgctgcatttggattatccatgccatatactagatgagaatctaaattaaaagaggagccacttaactaggggttagctctcctgactgctgcaactttagcttagcaattcggttttccatctgagcaagttaccattatcgagtgcttactgtgggcttgggactatactgaacattttacatgagttatctcatttaatcctcacaagctccttccacctcaagagggtaagtatttacttgtgcttatgactctcagcctgctgcttcatctgtaaaaatgggataagtgactttctcaaaatctaaaaaaggatattgaactggatccacaactcagatctgcctgaatcaaatacaagttcttaatgattacagtttactaaatacaacagcttctgcattctaagaatgtcacgaggatgaaacaattcgtggaaagcactttttggagaaaaaacaatgctcgaatgcttacataacagaatgttcacacaaaaaataggtgtaaagtgatgtatattctattgggataaccaatcgctttacaaaagcattcagtaaggattgctttttcagtaaacattagtggtatcttttctttcaatctgattccaggtttgtcaattttgctaatcctttcaaagaaccaacttctagttttgttgttttctctactgtttttcaagtctttatgttttttctttcctttctaatctattatttccttccttctgcttactttgatttactagggtcatcttctagtttcttaagatgaaaggtgagacttgatttgagatctcttgtttaaaaaaaataagtgtttactgttacggatttctctataaacactgttatatatgcatcccataagtgttggtatgttgtgttttcattttcattaatctcaaagtattttctaatttcccttgtgatttcttctttgacccactggttatttagcagtatgttgtttaattttcacatctttgtgaatttcccaaattcccttgtgttgttcatttctaatttaattccattttgaccaaagattatactttgtatgacttcgattattttaaatttattgaagcctgttttatggcctaacatatagtctatcgtggagaatgttccatgttcatttgagtagaatgtgtattctgctgttgttggacagagtctctacagatgtctgttgggtttttttgtttgtttgagatggagtctcatttgtcacccaggctggagtgccgtggcgtgatcttggctcaccgaagcttccacctcccgagttcatcctgcctcagcctcccaagtagctgggattacaggcatgcgccgccacacccagctaatttttgtatttttagcagagacggggtttctccatgttggccaggctggtctcgaactcctgacctcaagtgacctgcccgcctcagcctcccaaagtgctgggattacagaaatcagccaccgtgcctggcagatttagtttgtttatagtgcttttgaatcctctttttcctagttaatcatctgcctacttctatgcattattataaatgaagtgttgatgtctccagccactattgttagattttctgacttctttacctttaactagcaaagcaactcagtttttctttctaaataagagttatcattatcaagtgcttaccgtgtacctgggactatgcttactcttttatgtggattatctcatttagttattaataattattaagagtaaattgttatgccaggctcagaggctcacgcctgtaatcccagcactttgggaagccaagggaggcagatcacttgaggtcaggagtttgagaccagcctggccaacatggtgaaatcctatctctactaaaaatacaaaaattagcctggcatggtggtgcaggcctgtaatcccagctaatcgggaggctgaggcaggagaattgcttgaacctgggagctgggggtcgcagtgagccgagtcagcgccactgcactccagcctgggtgatagagtgagactctgtctcaaaaaaaaaaagtaacttaattgttaataattattcaatatggagagttttgtcagcttttgtttcatgttgtgggattttttaagtgcatatttgtttttaagtgttatgtttttctgatgaattggtccttttaccaatgtgtgatgtccttctttgtcccttgaaacagtttttgccttaaaatctactgtttgacattagcatagtcactccagctatcttttgattgctgcttgcatggtatatctgtttctatactttcactttctacctgtgtctttgaatctaaagtgtgcctcttgtagacaacatatagttggatcatgttttttgccaatctgttttttgttttttgggttttttttggatggagtctcgctgtcacccacgctggagtccagtggtgtgatctcagctcactgcaacctccgcctcctgggttcaagtgattctcatccctcagcctccagagtagttgggattacaggtgcccaccaccacacccagctaatttttgcatttttagcagagatggggtttcaccatgttggccaggctggtcttgaactcctgacctcaagtgatccgctcacctagacctcccaaagtgctgggattacaggcgtgagccactgtgcccagccgcaaatctgtcttttgactgaattatttaactggttttcttctaatataattactgataaggtgggagtcacttgtgggatatctgctcttttccttttatgcatcttatgtcttttgatttaatttctccactactgccttttgtattaaataggtattttctagtatatcattttgatttccttcttgttcctcttattgtattttttgagttttttttcctagaggttgccctagggactatgattaatatcttaacataaagtaggttcagattaatgccaacctaatttcaataatactcaaaaactttggtatagctctattcccttcctcctcctttgtgctattatcatcatacaaattgcatcttttataagttataaccctatcaacattatttcataagtactgctttatgtagttgtcttttaggtcagacaggaaaagaattacaaacaaaaatacatttatactatatttcatatttacctatgtagttacctttaatgatgttttttatttcctcatgtggattggagttattgtctagtgtcctttcatttcagtctgaaggatgtcttttagcatttcttttaaggcaggtctgctagcagtgaattctcttagtttttatctgggtatgttttaatttccacttttttttttttttgagggtgtctcactgtgtcacccaagtaggagtgcagtgacacaatcaaggcctcaacctgccagactcaagtgatcctcctgcctcagcctcctgagtagctgggaccacaggcacatgccaccacacccagctgtttgttgtattttttgtagagatggctttttgccatgttgcccaggctggtctcaaattcctgggctcaggcaatcctcctgcctcagcctcctaaagtactgggattacaggtgtgagccaccatgctcatcctttcttatagttttgaaggatagttttgctggatctaaaattctctgttaagtttttttcttttagcactttgaatatgtcattctacagccttctgacctctgtagtttctgatgagtggtaggcatttaatcttacacaggatcccttgtatgtgataagttgtttttctcctgctgctttaacgactgtctttgtctctggcttttgacagcttgattgtaatgtgtttagtaatagatctctgagtttatcctagttataatttgttgatcttcttgaatgtgtagctcatgtatttcattgaatttgggaagtctcagccattatttcctcaaatattatttctgcctttttcttttcattttctggaactcctttaatgcgtatgttggtaacttgataaaatgccacagatccctcaagctctgttcactcttcattcttttttctttctgttcctcggactggataattacatttgtcctattttcaaatttgctgattcttctgcctgtttaaatctgtaaacccctctaagaaatttttcagctccagaatttttcatgttttctatttactgatactttcactttgtttatacattattttcctttctcctgttctttgtccacggtttactttagtttttaaagcatatttaaaggttgacaaactttttgtttaatagatctaatgtctgggttttctcagggatggtttctgttttctaagttttttcccccatatataggcggctgtaattgctgtttcttcacatcttttgttgttgttgaaaactggaaaatttaaataatataaggtggcaactctgcaaatcagatttgtcccacacccatctttgtagagtttgttactatttgttatttttattgcaatggtggtatgtctagtacctttcctcgactaattctgtttagtctgtgttctttgtcatgttgcagtcaccaaaatctctgcttggttactttagtcttgagcatatgattagacagggatttccttaagtggttgaagcataagtctctcacctttacctgactttctagctcccaagaatattttggcacttttcaaagcctctgtagacatcacactcccctttttttaagttttctggccagtctcatttgtcccaactagtatagccatgtcaggcaactgtgctatttaaattattgccaccaattgtttataacaaacaacctgaggatagtttcctcattgagtgacctgagttgggttaaatgaagacaagccctgtgattgggactattccagggagctgccagacaggtcaaggagtgacaaatctctggggatggggcgtcttggataactccaaacctatcttggggggactctaaattccttcagtggtttctaggctactggttgtcacagctactgtggtctcaaggttgctgattttcaaggctactgtggagctgagaagaaaatggggacaggacaagttaaaacaccacaaaccttattgatcacggaaagtcagcttttttctcaaatacattttctttgggttgttgcaatcgtttggttaatttccagagtttaaaaaagtttattttgatcattcctgccagtgtcctcactgattttatgcagaatcagatattcaaagatccatactccaccattctggaaatgtttctctatgatttttttaatgggatatataggatttctcttaaattaatataagcagcatctataggatttctcttaaattaatataagcagcatctactacattcacttagaacactagacattaccaaccatgatagaccatctaaatgagaaaactgcttctcttctcaaatttcatagaatgtccatgctggtttccaaagcacatggcatctaccttcagtaagcaacacagaatattagaacaccagagttcaagttcgtatctatacactctccagctccaactaagagggcctaagggacagactgttcatcaatgactgtagactaatggttttcgccccttcaggcccacagccactttttatcagaaatatttttaaacatgttttattattctaaaacacaaacaatataacttacgtgaggcatatttttaaatcatctatcatgattaaaggtatctttaatatctaactgtaatgtaacagagaaataaaaggaagcaacttacggtaatgtgtaattcaatctggagatggccaaaactcctgatgacacaatcattagatgcttgcatatgtacatataattaccattaatgtacccactacaaatgcagactactgcagtagttttgacctggaactcaaatgccatgagcaatgttgccactagtgatagtttttaaaatgatagaaaactcttggttacgtactgaacaaagactacaaccttccctcacttaactggtaattgcattttttagcaaatcaagtactgcagatctacaacaaaaatataaaatggagttataatctaagctcaaaaaattattgtcaacgtccacccgtcagagatcatgaggaacagatctgcggttgaatcgagttgggtttatcaacacacttttacacaagagagatcacacaccatggggaaccatggggtgcctcagtatgagggtgctgggaagggctttttaaaggatttggggttgtgttgggtgatttcaagaagggctccatgaatcatggttttactctggattaagtgctttcagaaagcaagggaaattctaaatgagtgtaaacattgaaatttttaatctaggaggaagaaggaacagagtgatctaatgggtaatggagcaaatatcacacatgtaagccaagagacaagaatgtttggtcgctctatgatttacacagaatcttgctaagttccaacatgcctatggagtgtcttaatttttgtcttcctccaccacactcagagtggccttgtcagatgttgttgttatataacattgtttatattcaacagaatataatagcctagccattagggctaaatcagcttccagctgacagctgtaggggttgctcttcctttctcattataaacaggatttctatgtacataattattcagcgaggttcaaagaagtcatgagatacaggacaattctttgttgtctaaaactgtcctatgctcttcaggcacctagcatctctattcactttcactcacatttcattggccattgttaaccacatggcctcaaattaattaaggaagctgagaaatgtagaacaaatggaacgtttagtgagcattactatctctactacatgcaaccttcaataaattattttacttctctcagtattagttacctacctgtaacatgaggttacatggtacataatggtcattcttccctcttggggagaatcacatgagataatacataaaggaactttaataagctctaagagttatatagatttaaaaggcccatagtacctatatgttggagttaatgtgccatcacttctacacacacacacacacacacacacacacacacacccttacctatttagaggtctgggtcaaagaatacatactctgggggatgtagaattagaatgtgattttactagggccaggcgtggtggctcacacctgtaatcccagcactttgggaggccaagacaggcagatcacctgaggtcgggagttcaagactagcctgaccaacatagagaaaccctgtatctactaaaaatacaaaattagccgggcgtggtggtgggcacctgtagtctcagctacttgggagactgaggcaggagaatcacttgaacccgagaggtggaggttgcagtgagccaagattatggcactgcactccagcctgggcaacaagagagaaactccatgtcaaaataaaaaaacaaaaatgtgattttacttccattttactagcaccattcagtcaattcacttgtatccaaggctgacccagggaaaaaaaatggaaaaccacttatcctcagtctctcctaatttcttcagtcttaatgaaatgattaaagtgtcacagattttattttctaaagactatctcccatcccacatacttcttattataatgtaatcttaacactcctctcatcaagtactgggctctatgtacccttctatagaagctggatggaccttggttactgcttcatccaatgaagtatgacagaagacacatcatgtgaattccaagactaatcattaaaatgccatgcacttctcttgctctcttggaaggctcattgttagaacccagtgccaggttgtgaagaagtcaaatgtgcccacagggagaaactacacagtgtaggtgttccaaccgagagcctagctgaggccacagctgacagccaatgtcaacctccaggccagtagctgaaaagctccctgccactccctggctccttccccagccatcactgtgctccatccaaattcctgtcccacacaatttgtgagcataataaaatgacttttcaccagtaattctaggagtggaattttacgtagcaacagcatctgaacagtgcaactcggcagcaactacaatattcacttaattactacataaaggacaactatgtatttactaaattattacatctctaatactgtactaacaactggagttgttagtacaatatggaaagttagttcaaatggaaataatcatggataatgctcaaagtgcactgtatcgacaagaatccagttaggctatgagcaacagagaagccagaacattaacacttgaagaaggtagttcctcccttcacttttattaaaagttcaaacaggtcgccagatacgatggctcacgcctgtaatctcagtactttgggaggctgaggcgggcggatcacctaaggtcaggaattcgagactagcctggccattgtggtgaaatcccgtctctactaaaaatacaaaaattagccaggtgtagtggcaggctggtaatcccagctactagggaggctgaggcaggagaatcacttgaacccagagggcagaggttgcaatgatccgagatcacaccactgcactccagcctgggtgacaagagcaaaaactctgtttcaaaaaaaaaaattcagacaagtagttcagggctactatacccacaagatgggattcagacagtatctacctcatttctctgccattcacaaaacgaagcctttatcacatagtccaagatggctgctctagtttctgctattgtgtctacctttcaggaaaaagggggaagggatgggcgtgcctcctccttttaaggatacttcctggaagtgtatccattggcccaaacttggtggtgtggccacaccaagatacagcaataaaatctaggaaaagttttatctttattccaggatgccattccctagctaattaggtgggaaatctgtagaaggagaaaaacgaatattagggaatacagggtagctcctaccacatgcatattctaaaattcattgttacttggtttaggatgcagttcaaataacacagttacctaaagaactacaccaatgtatcctttgttagactctcaaccctaaagatttaggttagatctttcagattgtattttaaaatgtctttagtgcagtatcaattctcaccagacagaacagctaagtaaaataaacaagctcttaacaaattattaatttttaagaaaggaaagggcatttagagcaaatattttctctaaaaaatactaatatatcatgttttatatcctacagatattcctgcaatctgttttccttgggaaagtcactcattaacctgaagttcagttatatcatctaaagtattacatatttatcatgagggttacatgagattacacatgtcaaatgccttgtaaatagtagaattttatacaaatataaagttttgcaccttcaaagctatcactccaataagacacttattcaattaaacaaataatcttaaaaactattttaacaatgtacaaatatattcacaacataatctgctgattaagacttcaacaaagtttataatacctacaacagaatttacagatgcctacaatagtttgtagattggtttaatttacagttacatagattgctttaagaaataccattaatacaaatgcataatttacaatatccccattatagcaagaaaaaaatagattcagaaaataaaatgtcttttaggcatttattatgccaagtatgtaaattattattctcattatgacatgagaataatgctcttttagtggtaaaagatctattagctcaaggtccactgaagaactttcaatctagctatcctttctgtaaaataaatagaatagcagcaatctctgggtattccttaaactatgatgattccacttatattaactgggccttaagtagataacttcttacaaacaaaaataaaattttataaagtagttaataccactggccctaattgttttcacttgcttgcatacgtctaagaaatttccccatgaagtacatattaaaaactaacaattatttctaacttatacataagccaaagtgctcactcttaccatagaagcaaaactttctcctgaaaacaatctacagaaataatatgtaaacatatagagctttgagacagactaagaacatcctcctatgttctatggatcaaaatgcaaaggtctccattatctgtgtaaatgaacactttcattaacttgggatatacaggtattacatggccgtgtgcatacctatggaatgtgcatacctacaccacagaacaaatcttaacaatgtttctagtgccaacatatactttctagccccaactgctggaaaggaaataaaaacttaatatgaaaactacttttcctttttataaataaagtttttaagtggaaaaacaaagccaacactcctcgttgcaacatggactaagctctaaaaggttgagtcaagaatctcttcagttgttccccaatgtaacaaagcacataagctttctctattcaggaagtctgatcatctccagtgttccgcaaaagacaaaaaaagaactccttaacatcaaagttatttcacttcacacaccatggacttggggcctaggcctaggaaaacattctatatttctaagcagagcattaccttacatacaatggcccaatcacattaaaaagtagacatgctaggctgggcgccgtggcttacacctgtaatcccagcactttgggaggccgaggagggtggatcatgaggtcaggagatcgagaccctcctggctaacacagtgaaaccccgtctctactaaaaatacaaaaaattagccaggcgtggtggcgggcgcctgcaatcccagctactcgggaggctgaggcagaagaatagtatgaacccgggaggtggagtttgcagtgagccgagatcgcgccactgcactccagcctgggcaaacagagtgagactctgtctcaaaaaaaataaataaataaaaaagtagacatgcgctaatgaagtaaatccatggataccatcatccacccagctgtccagtttgtctcatttgagcagacgccggataccatgtaagacactaaccctatccatgttatgccaggtttaaggtttaatttcacctgtattccatgttcctccccaccttcagaaacactgaaaattctaacgaaaaaaacctaataagcacatacatgaaagttaccctaaggtggaccacagtaaaggtatattggagccatgcaaaaatccttcagaatgagatgatcatgtccctacatgaatattcattttctctacttttcatcttctgtgagagaaactgtacagtagaataaaaagaacaataaattttgagtacagagggctgggtttaagatctagctttgtaccactattagctgtataatcttaagtaaataatttaatttctcggggctttagttatctaaaatgtaatccctggaccagtgccctcagtaccacccagaaacttgggagaaatgcaaattatgagactccacccccagatctactgaataaggagtctggaggtggaacccagcaatcttgtgccctctaggtgattctcatgtatgttcgagtttaagaatccctgtcctacataatatcacttgcccaacctactgtactaaccaaatgcaaggtattactcatataaagacctagtcacggccaggcgccgtggctcacgcctgtaatcccagcactttgggaggcggaggcaggcggatcacgaggtcaggagatcgagaccatcctggctaacacggtgaaaccccgtctctactaaaaatacaaaaaagccaggcgtggtggcggcgcctgtagtcccagctactcgggaggctgatgcaggagaatggcgtgaacccgggaggcggagcttgcagtaagccgagatcacgccactgcactccagcctgggcgacagagcaagactccatctcaagaaaaaaaaaaaaaaagacctagtcacttttcccaagagatttaaccaataattatttacctatgactactactcatcctgctgaaaaccctgatgttgaggtattatagtaaaatccttatgttctagggggaaaaaaacatctgagtacaaatgttatggtcttcttgtgattcaactgttctccctaaaaccatacaacatacaggctgggcacggtggctcacgcctgtaatcccagcactttgggaggctgaggtgggcagatcacaaggtcatgagatggagaccatcctggctaacatgatgaaatcccatctctactgaaaatacaaaaaattagctgggcgtggtggcatgcgcctgtaatcccagctactcataaggctgaggcaggagaatcacatgaacccggggggcagaggttgcagtgagccgagattgcaccactgcactccagcctgggcgacagagcaaaactctgtctcaaaaaataaaaataaaaacatacaacatacattctgcaagggcattcacttaaagctcccataattgatgaaaaacaactgaacttaaaagtaatttttaaaaaataagttattatcaatgatagtttatccttcctggctttaaaataattttaggatactgacaatacacttccagactgtcttgaacacccccaaagagcaattacaacatctttatcattatatttatacaactatatgcctttaaaacttctgttcaggagcgtttcataaaaattaaactatgaaagttagaaataattgcattagtcactgatcacatccagaaaacacttacttgtcttaaaaactgctttccaaaatatgaagtagccatgctggttaaatgctttctgctgcgcaccttacacctgatgtaaccatacaggttggcaccttgtagcaccacacccataataaccaccgcctgggacaagggaaaaaaataatcaacggttactggcctgaaattgacctttctctgtgccataaatgagacaaggcagactgtcatgagaaagagaaggaagaggaagctctgcaaagccatgattgtgccagttgagattttccagagacagttgccagaacagacccatctgatagacgctctgcacaaggcacgagtcattcacccagcaaatatttactggacacaactgctctatgtgccaggcaccatgctagctgctggggatgcagtgcagggggagccttcttgctctctgtttcccattggtctgtgagtaaagttaggaaaagtaaatgagactcaggaaaggttcaaatgttaattattcctataggaattacaaaagaacagtcaagaggtagatcaagttcaataaactgagagcaggtaggggtgaatctctgctctacgtgacaactggcttctggtagaggggatgcaatgccctaaggcataaatcaaccgatgcctgccttccccgaggagagagacagctccaaggggaactgtacttttgcagagctgtttgttcctttgagtttcattttctcacctatggtgatcccactaggatcaatgagaagtgagaaaaagaaactcaaaacccattctttaaaaatttctaattaatcttaattagaaaaattgagacaatgtgagggattcccaaggttaaagactctaatacagtgatcagcaaagttctcctgtaaagggtcaaatcataaatatttcagaccatacggtctctgttgcaattactcaactctgctgttctaatccaaaggcagccatagacaatatataagtgggcaaggctgtttttcaataaaaacttacaaaaacaggtgtcgggctggatttggtctgcaggccatagtttgccaacccttgttctggaataaacagctcatcgaccattctactcttttatatctgtgacaagcaaagcagctcaatgaaatgtcgttttccaatctagatttattctccttacccttaacaagatgtatagctgattttaatgtttaattaatagatttaaatgtttgattaatgaacaggttcacattcctagtaaaagaagaggaggtggtactttctgttctaaacttatgtttcatggaattaaacgtgttagtgtaataagagggtgctagtttcctaaataaatataaaactgtgtatttatttgaataaatttccttttaatttcccatgcttctcaaatggggcactgctgggtattgtatatatcaacatgccagggtacacctgaattcaaagaccaatcacgggtcctgctaaggcatcgatttactcaatggcaacaaatgttaaaatctgtaagttaaacttctggtttaagatggtgcagtgaagtcagacatgaagatctccctgcccttaaggtacaaacagcaaacagcgtttttaaaaacacaaataaactaataccaacaaacacaaaaaagggctggtggccaaagaaagagccaggttggagcagctctacatagctccaaactctgcaaagaagctctaaggaaaatttcactaataattaccatccccaggaacttatagaaaagcaaaagacccgagaaaaaaatgcagaaatagccatgacagcagaaactcctcccaactaacaatgacccaaacaggcaggaaaatccctgcagctggccatagtggtgccaccgggtgggaagaaggcaggagacgaagcgcagaaggatcaataatcatgagagatgatcatcttaagagaagtgaggaggtgggagactcatggagagactgggtgaagcccattcccgtcctgtggtcttaacccatttatttttattatttttatttatttatttttatttatttattttttgagacggagtctcgctctgtcactcaggctggagtgcggtggcacgatctcagctcactgcaaactccgcctcctgggttcactccattctcctgcctcagcctcccgagtaactgggactacaggtgcctgccaccacacccggctaatttttttatttttagtagagacagggtttcaccgtgttagccaggatggtctcgatctcctgacctcgtgatccgcccgccttggccctcccaaagtgctgggattacaggcatgagccaccatgccaaggtcttaacccatttatgctgtaggctgcaattttgtgaatttttgcatgagtgaaaaatcagaccttggtgattaccttgagcagtaggatataaataactcctacatgcttagcgttccaataatggaacactaggcataagtaggttaacacaggatcaaactggctttcacataacctctccctgttttgttttaaggaagtagaaacactgctagaaaaagactgggctcactctcttggatggatgctaaagctctaaggtcttacaaacaatccaaagcagaagggaagaaccagaagagagtgcacagccaaccagcagacaagagccccactaaggaagagaacgcaaaaccaggcagcccagccaagacagcaagagcctggtaagttctccacatcgcacatcacacctgtgccttcaggctaccaaacccagcactgcaactccagctcagagcagcagccacgtgcctcagacatcaggagaaggtggtcaagggggattcacccgcactaaaccagcagaaagagaagggctggacaggactgtcactgtaaggataagcaaaatggataaggaaaaagggaagtgcatttatgcaaaactatagcgaaaaaagaaaaaagaagcatagtatacagaagataggtgaagaatctactcgaaaagaaaaaaaacccaccaaaataaaagcattcctgggactatttcaccctacagaaaaacctaaagaaaagaactcaaaaagcatgagggtgagataacaggagatgaaaatggagctgacaaagctaaggaaatacagagagaagccttagctgagcacttaaaatagttactgttctctcctctgcactctctaccccattactttgtatcattaactaacatcccctactgtattttttactgtttatctaccttccactagaacataagctctactggagcagtcaacttgtttactgtcccctaacttgtccccctgtgtccccagacagctctgacataagagtgaactcttaaaattgctgaataaataaggaaaagatgaataattaaagcaacaagaaaatagtagatgaaaacaaataaaaatgatccaacataaacgtaactggtacttcaaaataaaaggtcaaaccatagaacataaataaatgcaaagatttaacagaaaaaattttcctgattccaagcaaaactttagtctgcctgtcagaaaggcacagactccagaaaacttgatatggaaagataaatacaaatacatctgggttacatgaactaaaaaaaaaaacaccttatgaggagagattacaaaggttaagtaagcctggcctcagacttctccaagatattcagtgaaagaaaatgatggaatagcatcctccaaaaagaaacaaactgtgacccaagaatattaatccagccaggtcatcatttaagaatagtcaataggctcatatgtttaaacatgagtcaaaagaaaatgtagccaaccaataagtaaaaggagaagctgcaataagactggtgataggcaatgaattgacttttttaaaaaacagatcaaagactgaacaaccagtaagaaatatgttttcaaaagataactattataaaacttggtaacacaaaaataacattggaacaaacaagagagaaaggaggaaactcataggaaggaatatgagtgtttattttcttccctttctaaacagagtctattaagtcaataaacaggtttaagtacattaattaatgttacaaagaaaaccactagaaggactaaaataagactataataagcaaaactctagaggtaggaggagggagaagttaaagaaaccatattagcgtaaagtttcccattttccagagcaggaactccataaatactgaatacatttcctaattcatgaaagagggtaatgatataacatataaagtaattaaaggtaactaccagaagaactgaaaaaagacaataagcttccaataagcttccaaatccaaagaaggaaagtatgaatgtatgagcacacacaaagaaaaaaagaatctatatcacaaaataggactaagaaaatactacaaattaggaggaaaaacataattaaggccaaaatatatctgatatcaataaatattgtgtgaaaattcacacaatatttattcatatcagatataagatagaataagaaaaaacaatatgagatataaaaaagagtaagactcacaaattgggtcaagtgacaaactatattttccaaagacagcagcaacaatatctcctcttccacaaagtcttctagcaccttcttattccttatcaagagtagagcctaattcccatttccttgaatgtgagtgggcagcagaagcaatgctatgacatcttaggctagattgtaaaagcttgtgagctagaacaccccacaagtgaagtactgggctgccacgtaagcagtcccaccaccatgaggccaccatgccatgaggaagcccaaaccaaggcacatggaaaaacatgtggagaggccatgggacctcatgaagaggagatggctcacaacccccatcattccaactactgtctgactacaactactcaagaccccaagccagaatctcccagcagagcccttcccaagatcctgacccatagaaactgtgagataatggctgttgttgctctaagccactatgttttggggtgatttgttaggcagcaataggtaaccaaaacagattaccaaccattatttccagaaaagaccactaatatcctagaaaactggtgggaaggggttttttaggatctcttctccagtattatagagaaaggtaaagttgggaagcaaaacttgggaattacatgatgaagctgcctattcaagataggtccctaatgataaggactcagttgcagttgttgcttcctatgattaccatcagacatcttaatggattatttgaaagttctacactgatactcaccagccactttactgtgaaggagaagagtgcactaaaggcaaatatcacccacagtactgaacaggcaataagtcccaaccaaaagattcttgattcagcctctgacacagttttattctcttgagaggactcctataaaagaacataaattcaattatcatgttgtgaaatttatcaataaaaagttcaacatatttaataaaaaacatattacccacaagttcaaatattaatacacatagcccaactcctaagttagaacccaaaaatacatgactatcactctcgtaattttaggaactgatctatattaactcaagaattttgcattttcagggcaggatggatggtttaccacaactcatgacagtaaagagtggtctctgataggcttctattcaattcttcttgcacttgtactatttattcataaggaagctctaaatgatacctttctgaccaatgatcaaggaaatcacagttataatcattctggagactaaaaggtcaaattagggtccagaggggaaaaaaaaaacggaatcaagggattctggacaataatcaaaatgtcttagcaatacccaggaatttacaagggtggtaagttgtttccaaggtagattccataatataaaggaatacaggctcattgaacacagtgccactttcttaaaataacttgtcaatacccttggtgtactgtcgccaagaatttggtcctctgcttccaaaacttatttccacaaggaaagtgaatattcactatagtgtagcaggctaacccaaaacagaccaggatccccagggctcctgaaggcagaagcttaggaatagagtgctccaatcagatattctatccagctgcactcctcctcctttttcctgcccagaaatgaaagacgaccacaggagcaaagacagaacaagatgttaaaagcagttatctgctgagcatagagggatttatggagacactaacaaaggcaacacagagatcttttatcagcaatccctgacaggcagcttagcacactgtatgaactcagacccagtgtcttccctcaaaggattctgttcgtatattgcttgtttctggtctgaactagacagaaaaatgcattaaattctagaaggccatctcctttagtgctgacatgccaagtgatttggtatagtgtttttaattctgaatacttcatcttccagtatttaaatatagtctacaaataatttagctgataacattatttaaaacaaaaaaggcactttacctttctagattcaaacacccaatggctctttccatcttcatcaatgtgattccaccaacgtaggccaaccattagtctacctgtgacattctggtgaagattaatataaacaggcacattttaaaagcattatttaaagatctgtcacaagctcctatcttagtgtaacatttcacaaacaaaaaccttcagctttacctccataatatccagttagcaaagactactatgtatcaggcctggctaaacgattaagtaaaatggtaatggcaggactaataggggtagaggtgacagagcaagcaacaagtccacccataaacattacaccttctcttttccctcatgaacaatttgccctttctccagttccctaattttccctaaaccccttgctatttggttactgtgacctactttacatcctgactatagctacatatattttacaactacatatccctgaaaatgattatagacactggccttcagtcagtctctcaagtgtaccaagctcttttcctacttactaaggtaacaaattagtttgatagctttcctaatctttatttactcaacaaatatttactgagcatctactatgtgctggtaatacaacagtgactaacagataccaactccttcctcagggaaagaggtgaagagaggcagacaaccaatgcacaaatgtaccattaccaactgagttaagtcctgcaagggaaaagtgtgggatgcttgaagagtataacagggaaatttgatctagtctgggtatcagaaaatgactctctgaggagtcaacatttggaatgaaatataaaagataaataagaatcaacagtaccatggatgtttaattaatggtgtccactaatagattcagtggttctgtgaacctcgatgggtaaaaaaaaatgttaccttcattttcattaacctctggctaaaatttagcatatctttaaattatgaatgtagacaacaaactatgaatgtaggtaaaattaaaaacaccctgacacaatagaaatcacaggcatttttttattttgtactatatttgctgcagttacctcaaaatattgtagttttgttttttgtttggttttgttttttgtttttgagacagagtttcgctcttgttgcccaggctggcatgcaacggggcgatctcagctcaccacaacctctgcctcccgggttcaaacgattctcctgcctcagcctcccaagtagcagggattacaggcatgcgccatcatgcccagctaattttgtatttttagtagagatggggtttctccatgtcggtcaggttggtctcgaactcccaacctcagtgattcacccgccttggcctcccaaagtgctgggattacaggtgtaagccaccacgcacggcctcaaaatactatttatgctcaccactgctttgaaagtagttagcatatcattaaattatgaatgtagacaacaaactatgaacataggtaaaattaaaaacaccctgacacaatagaaaccacagacatttttcattttgtactatacttgctgcagttatcttaacatattgtttatgctcaccactgctttgaaagtagttattagacctgccactagatcttaccattaataaattcataaagtatagtagtcctcccttatctgcaggggatacattccaagacccccagcagatgcctcaaattgtggttaataccaaaccttatatatgctatattttttcctataagtacatacctatgataatgcttaatttataaataatgcacagtaagagaataagaaataaaaatagaacaattataacaacataatctaataaaagttatgtgaatgtagttctctctcctcacacagtatcttactgtttagcgtagcatatagcagtactgaaaccgcagaaagcgaaacctcagataatgggggaactactacacatataactcaatcagaaatttacttttttaatatttttaaattatatttcaatataagtgacttcctttgaaatcttatgtattttatatatgtgaaaacttattcatgagtttatgaaaggggcccatggcataaaaagattaggaatccctgtatgaaggtgatgtgggaggaagaagagcattccagatagagcagcaggcactgatgccctaatgaagaaagtacaatctatggatttatgggacttggtcattaattggatatggagtaggaaggaggcaactgatacatttacggtttgctcaagtaaaaaaatagtgattccaggccccacgaaagggaacactcaaagaagaagagcttttggggagtggaagatgacaagtagtattttacacatgttaagatataagatgcctggccaggcatggtggctcacttgggttcaagaccagcctggctaacatagtgaaaccctgcctctactaaaaatacaaaaattcgctagggatggtggtgcatgcctgtagtctcagctatctaggagggtgaggcaggagaatcacttgaaccccgggaggcagaggttgcagtgagccaagatcacaccactgcattccagcttgcgtgacaaagcaagattttgtctcaaaaaaaaaaaaaagatttgagatgccttcaagacagccacataaaaacgtcaagaagacacatggagaggccttaagttgtgaggacaaacctgaatggagatacagatctgggaggcaacacagcttacagatcagcaattcaaaccagaagcacagacagcactccttaggaagggaatacaggagaagaaaaggaagagtcttatgagaccaaaattcctatgggagagatgctaagtaaaaaaaaaaaagagctggcaagggagacctaaaccagaggtctcttctataggtattttcaaagaatgctctcagaatactttcaaactcttctgtttccattttctaactctttatttcctgcttttatctttattagtttattttcctgatttctcacacttattgcttgtttttgaaatttctggactcaagtagtccattattttccctctttcttgtctaaaataaaaggctttagtctattattttccctctgaattcagtttttgacatattcagaaagtttaactgtaaatgatcaccattaaggtataaataacttatatttacagtttttgcttccttttaaacccaagatatgtagtagttcgcttttttaaaagaattccaatttcaacaactactttctattaatttctagttctgtttctttggagtagaaaatgtaggtgctttgggcaattttattttgattttcttcacagtgatatttagtcaatttttgtaaatgttccacaggcatttaacaagaaagtattctctctgtcatacaaagtcccaaatactgctatcaaattgatgttgccaattatttcattcagatccttcagaacttatttattttttggcactttggtttgtttaagatagtagtttgttaaactcatcataatgcttttctattttctaatatttccaatttttttactatacatagtttgatataattttactctgtgaatgatcttcactgtgattcataaaatcacctttttttgttcctcttagtgctttcttactctgatccatatctcatctgataataatacaatgccaagtttctttttgtttgagttgatctttgccttcttttatttttgcctgatgttatctttgccttcttttgttttttctaatgtcattaatttggttagatcttttgtttggactttgatttctgaccaatcttagtattcttgtctttaaatgggtagtttaatcaaattacatttcctattataatgaatttgctattacttacatcactttatacatgtactctctgatttaagcttccttgacagttgctttgttttccttcttttgctctatgaactgttttacttgctccatcttctccaatgttgcagaagatacacgactggttttaaattttactaatagttgccattattgttttttttttttgagatggagtcttgctctgttgcccaggctagagtgcagtggcgcgatctcggctcactgccaagctccgcctcctgcctcagcctcctgaatagctgggactacaggcgcctgccaccatgcccggctcattttttttttttttttttttttagcagagatggggtttcaccatgttagccaggatggtctcgatctcctgacctcatgatccacccgcctcagcctcccaaagtgctgggattataggcatgagccaccgcgcccagccatagttgccattaaatttttaaagccattatttaaccttttttactcaatttgtcagagtgaagaataaaataaaaaccaatataagctttagcatttaagcatacctttaaattattttcccttctctacctcttctttatcttcattaacatcacctagggcaagcctatccaaccctctgcccacaggcctcatgctgcccaggacagctttgaatgcggcccaagagaaattcgtaaactttcttaaaacattatgagatttttttgtgtgcgattttttttttaagctcatcagctaatgttagtgtattttatgtgtggcccaagataattctttcttccactgtggcccagggaaaccaaaagattggacacccaggggtttagatgaagattgattttttgtttttttagtaagtacattgagatttataacaattacgacacatctccattttaactgtttcagaaccctgcttatcccaagtccacttaataatttccctattcttgacttcttaattttgcttcatatctccattgttttgctatctataagtaattttgccaaggataaaagggtgccattttttaagctcttgtttaaaaacaaaaataaacaaacaaataaaccttatcagaaaataaactattttgatcgcattttttaaaactctaaacccagaaaaattttaagaatttggaaattaccaggaagaactgactggaaagcatgttctatttggctaaacagaaattttatgaacaacaaaaagaaacgtgtatcaaaactgtgagcagtatgtactaaatactttggagcataaagtaacagaagaaattcaaagaaatgcaagccaaagaagactggacaaaagaaaaacctaaagaaaacagacctttgaaatcttccttctcagcattatgcggcctacggaaactggccatcaccaagccaaccacttcagatatctttaagaattaaaagatggccaggcgcagtggctcacgcctgtaatcccagcactttgggaggctgaggcgggcagatcacttgacgtcagaagttcgagaccagcctgaccaacatggagaaaccccgtctgtactaaaaatacaaaaaaattagccaggcgtggtggtgcatgcctgtaatcccagctactcgggagtctgaggcaggagaatcacctgaacccaggaggcagaggttgcggtgagccaagatcatgccattgcactccagcctgggcaacaaaagtgaaactccgtctcaaaaaaaaaagaattaaaagatctaaaaatggctacattggtggatgtgaatagggttgtaacatcttactagtctttgaatcagtatatgtctctgaaactccaaaatcagcctttgatttttttctccactattttactatattttcgaacacacacagttaaattttacagtgaatacccaaatatctatcatctagagtccatatttaatattttattatgcttacttatctatttattatgtacctatctatccatccatccatctctctaatcattgttcttgagtttgaaaccatttcttacactcctttctatcccctacagcagggtgtctcaaccttggcacaactgacattttgggtcaggtagttctttgttgcagaggggccgtcctgtgtgttaggatatttagcagcatacctgccctctagccactagatgtcaatagcacactcctcccacctccagtcatgacaaccaaaaacaattttggacactgacaaatattcagtgggtggcaagcttgtctctggttgagaaacactgccttaaagcatccataggagccttttcaaaaggtaggtattttttaggtatttgtggacaaactacactggggccttatctagaaattatatacaacacacctacaggtaagcctgaagcaaaacccatggtatggattagaagcaacattgtagggtctatggttgctagtcacatttgtttgtttatttgactttaaagctgatgtaggttagaatatggcacagaaaaatcagcagcacagtaacctacatgtctcatcttgtattgtcaaagggaaaaaatgaaaaaaaaaaaaaaaaactacatgcaatttgatatatctagcacttcaacacagatgaggtttgaagtaacaaaagattaacaataatgcaaaatgctgtcatatttttatacatcattttcatattaaatataattttaaaataaaaacaatcaaaattaccttcactgcccaaaagtcacacgacaacaacaagataattgtaaccatacaggtaataaagctgctgctgagcaactcacagagaagacagacgatgattgcactgactcgaaagaataagtggaaaaacgatgctactggatgtctgaaaaccaaaacacaatgaaagaaatgcaattacattttactacaggtactagcaaatgtagagaaaaatgttttagccatcgtgtaactgtgaagagttttgtcaaaataaaagaggtgactttagtaggaggaagcaaacctcctagctctctttttcttaagccccactatttgactaggccctatagtgacagaaaatacactatgcacagatgactttaacacctcattgaatataaactttcacaaaatagataataaagaattttacctctcttggagaaataaggaaaccgtatcttagaatttgaatcctattttcaaatcacgccaaaagaattccttagccctcagaaatcactcagacattaagacaaagttatcaggtagtttgtttgtttctttttttttttttttttttgagacggagtctcgctccgtcgcccaggctggagtttggtggcgcaatctcggctcactgcaaacttcacctcctgggttcacgccattgtcctgcctcagcctcccaagtagctgggactacaggcgcctgccaccacgcccggctaattttttgtatttttagtagagatggggtttcaccatgttagccaggatgatctcaatctcctgacctcgtgatccacctgcctcggcctcccaaagtgctgggattacaggcgtgagccatcgcgcccagcctgtttcttgttttttaatagcttttttgagatataattcacatatcatacaatttacttatttaaggtaaacaatctaatggtttttagtacattcacagatttgtacaaccatcactccaattttacaacttttcattaccccagacagaatctttgcacccactggcagtcattccccatttaccttcaaacccctcagcttctagcaacagctaatctatcttctgtctctacagatttgcctattctggacatttcatataaatgaaatcatacaatatgtggtcttttgtgactggcatgaaagatgaaagaaaagtaaaaaacagcattttagcagggttcaagtagaatttgctttcgataagtgaatttatttagagagaattaaatttagaatagaaatgttatgtgattttgaaatgtgcacaataaatcaaaatgtaaagtatctacagaaactatataaagaaatggtacattcttggaaaatagcacagaattaaaaacacaggtgttcaaataattggatttgctgattttaaaactcagtattaagtatgccaattattcacaagaaaatctgaaatgtcatctttgtcttacactaaatgttaaattagcaacatgcagtattcacaagcacattgaaacaactctgccttgactcccatcagctagcactgacatacatacagaacaacactggacactaacacagctcatgcaacttctcctcctacctgattttggcttttcttggtctattagtcgtctcctcttccgcatcaaacagtgaaacatcttcagtgtcatcattactatcctggttggaaaaataaatggtcaagaagcaaaacaaaattcagtgtttacacagccactgcaatgcaaagctgcatactcatcaaaatagaagataaaataatgtggttacagcatcaggaattcaaaacctagaaaaggacacatgcagatcctccacccgcctcctcaaatcatctggcaaaaaccccagagaataatcgaagtctcagctcctccatccctgcccctaggctgcaccatctgagaaaactctggggtgcagatgaggctactacaacttaacacctgtcctcctcacctgttctctcccaagtcacagagcaagccgaggctactggggataatctcaaggtttctggctccttcacaaaatcatctgactgcatccttagttccatgaccccttctcacaactcctcctcttcttatccaaggctaaaccaattatttgtgctcagaataacttcttttcatgcctcctcggggatttgtttcatcattttcccctgtatttacactttcttctatcttcaagtctatctattggatctttcttttttgttgttgttgaaatggggttttgctcatcacccaggctggagtacaatggcacgatcttggctcactgcaacctccgcctcccgggttcaaacgattctcctgcttcagccttccaagttgctgggattacaggcgtgtgccaccacacccagctaattttcatatttttagttgagacggggtttcaccatgttggccaggctggtcttgaactcctgacctcaggtgatctgtccgcctcagcctcccaaagtgctgggattacaggcctgagccaccacgcctggcctctattgaatctttctaatcagcatatgcatataaacttcttcaaggccacttattaggcaaaaaaagatttttttaagaaccctgatcctgaatctcctcttcaatcctctaccttcccaaagcattgcttccttttaccttaggcttttttttttttttttgagatggagtcttgctctgtcgctcaggctggagtgcagtggcgtggcctcaactcactgcaacctctgcctcctgggttcaagtgattctcctgcctcaccttcccaagtagctgggactacaggcgcgtgccaccatgcctggctaattttttgtatttttttagtagagacaggtttcaccgtgttaaccaggagatttcatgaccttgtgatccacccgcctcggcctcccaattgctgggattacaggcgtgagccaccatgcccggccccataaccttaggcttctaagagtggttcacacctcaattcactgcaattcccctcaactacaacaaacctgatcctgttcctctcctagcgccactcaccagcctccctgcctttatccctctctattccagcctctcctttacattacccagagcaatcctcccaatatggaaatcacaccatgtcactctactgctcaaatttttcaatggcatccctacaagtataggataaaatttaactccttcacataaagcatagaagatcacagaatctaatgccccctacttgcttctgacactgtcttcattgagcactgttgagcactgaagcaatactgttactacatggtctctaagaacactacggtctctctcccatctcctgcctttcacatgttgtctcagaaaactcttcccttccccatgccctgctcaccaccaaataccaaatcatccttcaagttttttagctcaaatactgaaatagctgaaaacctgtctctgaaatccccatgttcccacagcacttggacgaatctccatttgaacaattatctcagagtattcttattgcacatctacccgctcctacctccatatagattaagctgctggaggacctagaagacaaggttttttttttttttttttgagacagagtcttgctctgtcgcccaggctggagtacagtggtatggtctcagcttactgcaacctccacctcctgggttcaagctagattctagtgcctcagcctcctgagtaactgggattacaggagtgtgtctcggctaattagcctggctaatttttgtaattttagaagagacagagtctcaccacgttggccaggctggtttcaaactcctgacctccagggatccgcccacctcacccccccatagtgctgggattataggtgtgagccaccacgcccaaccaagactgtctttgcattgtagtaaatcctagtgtctagcagagcattcagccaagtggtacagtatttgttgaaggcatgagtaaataagcaaaggagacgataatatacagctgactgtgatcagggctgagaaatctaagtgcaaatgggagccagggaaggaagcaaatcattcctactacagggcactggagaagctttctggaggagagtttgtcagctgggccctgacagtccgcgtaggcctccctagactaggtatattttgaaaggcacaggtgggaatacaggaagtttgtctaagaaatggtcaagtagctcatgcagtaagtgatggatgcgagaagctcctactgagctaaggctgaaaaggtaaaatggattcagatctatgaaactagtggttctcaaccttggctacaattagaatgctctttttcttaaaaaacaaacaaacaaacaaaaaaaggctgatacttgggtccagccctcagtggttcagatataattgctttgaggtgtgatcataacgtacagcaagactgagatccaccgtatgatgttatgaataaaaagctgaggccttctgctctcgatcccaacagtctaatcgccatccagcggccagggagactttttcacatcaaatcctatcattcccctactgaaacctctcagcactatgactgaaaaacagactccctatcatgacctatcatgatctggtccctgccaatctctaagaccttatctcaggccactcactcttcattaactgtggtaggctgaatacctcctcacccctcccaaaaatgtttaggttctaatctctggaacctgtgaatatgtaaatttacttggcaaaaagaatttcacagatgagattaagttaaggatcttgaggtcaagagatcatcctggattacccaggctggtcagatgacatgattacaatggtccttacaagggaaacaaaggagggtcagtgagagaaggtgatgaaacaagcaaagtagaggtgagagacagagatttgaacaggctgtgctgatggcattaagatggggaagggatcccaggtgtttagaagctgaatcaggcaaggaaactgattctccagaacccctacccacaccttgatgtttaaccccttgagcctcattctggacttctgaccaccagaactttacaacagtacatatgacttcactgccgcagtagcaacaggaaatttatacagtacctaagctcctgccagactggccatttttttttttttttttgacacagggtctggctctcgcccaggctggagtgcagtggaacaatcaggggtcactactgcaggctctacatctcagcctcctgagtactgcaagccaccatatctaatattttaatttcttgcagaaatagggtctcgttatgttgcccaggctagtctcaaactcccgggctcaagcaattctcctgccttagcctcccaaagtgctacgattagaggcatgagccaccatgcccaggctggccttcttttcagttccttaaacatgccaaacttgggccccgtcaggttcttttgcacttatggttcatattacctagaacactattctcttaccctgctctttgaaagactgatttcttctcatttattcagtaaatactgagtgcctaccaagtgccaggtactgctgtaagtggtacagatttaaaaaaaaaaaaaaaaaaaaaaagacaaatagctctgcactcctggagttacatttactaagatggggaagaccatggacacaaaagatttcggggcaaaatcagcagtttgattttggacattttaagatgctaaacgacattttaagatgctaaaaccaaaaaagcattgaaagggagatccattggagtgttttaagtgtaagactgcatgttctgactcacctgttagaaagagaattctggctactgtagtaaaaatctggagggggaggggagaagaaggagggacaaaagcacaacgctaggagactggttaggaaactactttaatcacgaggccaagaagtagtggcttggtctaagatggatgcagtggaggtgatgagaaatagattccaagtacattttaaggtagagctgacaggatttgctgatggactgactgactggggaggtggaggaagggtaaataaaaggaatcaaggaagattccaaagtttttgtcctgaacaactaaaaagataaagatggctaagacagactcctggcattccaataattagagatcacaaagataagaaggaataggctgtggggactgaaaaagaagtaccaaggaacataaggtgagccaggagggggtagtgtcctggaaaccaaacaaagtgcctccaggaggaggatccatcatctgtgtcaaatgctactcataagtaagatgaaaaccaaagagagaccactgtatttttttttcttttttttgagacggagtctcgctctgtcgccaggctggagtgcaatggtgtgatcttggctcactgcaacctccgcctcccgggttcaagggactcccctgcatcagcctcagcctcccgagtagctgagactacaggcacatgccaccacccccaggtaatttttgtatttttagtagagacggggtttcaccatgttggccaggatggtctccatctcttgacctcatgatccacccaccctggcctcccaaagtgctgggattacagccatgagccctgcgcccagccatgaccactgtatttttaacaggtcatcggggaactcagtaagagcagttccagtacagttgggagaggggaagagagactgactagaatgaatacaagagagactggaagaattaaaagacaagtatatatgatacaagtctttaaaggaaaaagaatggagtgaccagtgaaagagcatgtggtgtcaagtttgttttttttgtttgtttgtttgttttgagacggagtcgcccaggctggagtgcagtggcacgatctcggctcactgcaagctccgcctcccaggtttacgccattctcctgcctcagcttcccgagtagctgggactacagctgcccaccaccacccctggctaatttgttgtttttcagtacagacggggtttcaccgtgttagccaggatggtctcgatctcctgacctcgtgatccacccgcctcggcctcccaaagtgctgggattacaggtgtgagccaccgcacccggccaagttttcattttttaaggtaagagaaattaaaacacgtttatatgttgatgtgagcaaacgtttaaaaggattaaaaaactgatgatgcaagaaagagaattactagaacaatgccttccagtaggcaagaggagatggaaaccaggacacagtagacaggaagacctaagaatggagcactgacagtccaattatcataaaagaatatgagaccctgagtaaacatgcaaataaataggcagctagtgtgaaaattgtcttccgacggcttccattttcagtgaaacaagaagcaacgttaccagctgagagaggataagagaagaaacgttgaagatttgagttttaatagttgcctaaggcgagagggtgaaggggctatggaaatgtagaatgaccgcctggcagcactaagggctcgactgaggttcacatcacaaacttatcaagtgggaacagtcggccgggcctggcggctcacgcctgtaatcctagcactttggaaggccgaggcgggtggataacctgaggtcaggagctcaagaccagcctggttaatatggtgaaaccccatctctactaaaaatacaaaaattagccgggcatggtggcgggcgcctgtaatcccagctactctggagggtgaggcagaagaatcgcttgaagccgggagacggaggttgcagtgagccgagatcacaccattgtactccagcctgggcaacaagagtgaaactccgtctcataaatgaatgaatgaatgaatgaatgaatgaataaataaataaataaataaataaataaataaatagtgggaacagtcaacatggttgtgtttctccagcctcatccggcctgggcgcaggttcaaatgtcagaagcatgtgaacctgaacaactccatcttcaataggagctgggtaaaatgaggctgaaacctactgggctgcattcccagacagggcattctaaatcacaggatgagatgtgaggtcggcacaaaatacaggtcataaagaccttgctgaaaaaacaggttgcaataaaggagccaaccaaaacccaccaagaccaagatggccacgagagtgaccactggtcgtcctcactactagactcccaacagcgccatgccagtttacaaatgccatggcaacatcaggaagttactctctatgatctaaaaggggaggaatgaataatccaccccttattaaccatatcactaagaaatacccataaaaatgggccaccagcagccctccaggctgctctatggagtagccattcctttactttcttaataaacttgctttcactttgcactgtggactcaccctgaattccttcttgcctgatccaagactttttttgttttgtttgagacggagtctccctctgtagccaggctggatggagtgcagtggcccgcggctcactgcaacctcggcctccccagttcaagcgattctcctgcctcagcctcccgagtagctgggactacaggcgtgcatcatcacgcccaactaatttttgtatttttagtagagacagggtttcaccaagttggccaggatggtctcgatctcttgacctcatgatccacccacctcgtcctcccaaagtgctgggattacaggcctgagtcaccacgcccggccaaggaccctcttttcgggtctggatcgggacacctttcctgtaatacagctgaatttaaccattattagattttctccactcaaggcatctcctcataagcagtctttcctgaccataaatcttagttgtcctatcctcggacacttgttatttcatcaccctgcctttgcaattatctgaaaatatctttggttatacaatttatcgtgtctccccacccaacccccatctcctagaacccacttccctaacccgaaaatacggggcaagaaacctgtctgtactggtcacaaccctatccctgggcctacaaccgtgtctgagtcatagtaatccctcaacaaattttgtgtgaaccgaaagaaaaaaacacttaagacaatctaagtgaccataaacagtagttttttctaaaaatattattaatcttacgagtctctggttgccaacatgtggactacaattaactctaagagcacaaaggagagaatcaccaacaacattagtttggaaacagcaatttgaaagcgaggctctggcggtgtcgccgattcctacaagatagcatcgcacccctgggtgtcaggaagctaagaggcccgcaggccgctcctcctcaactccaccccggcaataagggttgaggaaagagagacccccactcgcgctggttaacaatgggcgtccccacagccgcaagaagtacttgctctgcgccgcacgggtcacgcctcccccagcggcctcagaacccccagcagccctcctcagacaactacccacagccctccactcccggccgccccgctcctcctcgagttcgagtagcgggcgcgggggacgcgggctccagtcccacggaacctgcagagccagtcccaggagccgccaccctcccagcgcgccctcagcccctcacctgctgcaacatggcggccctacgccagccctgcttccaggagccacgtcagcgcagcagcgtacgggtccgggtcggaactgacgcgacccgtcaccaagggccagcagggaccactgtaagagcctcagtccggcctcacctccgctttgagggagcaaatccaggggcggggcgagcgggggcggggcgagcgggggcggggcgagcgggggcggggcgagcgggggcggggcgagcgggggcggggcgagcgggggcggggcgagcgggggcggggcgagcagcccggacacggcggaggcggagcctggagcaggagcgaaagggaaaggcattggggccacagtgggctccaagtggaaagcttcatggtctgttttacggaagtatttgctgtccacccaatgcaaattctaaagtcgttcccccagcgtcgctgccccgaatgcaggggggcggggttttattgtataatataattttctttaaatattttacaaagacttactcctgtacagtattacttttgtactttaaattgtagaagcaactttttaaaatatgttcttgcagagaagtaaaacgttaagaaaaacaaggcaggaggactctagagtaactaatggacggtattattatgggaggtataaacttagactccaggagttgagaccttgcgccctggagcttaggcgcctgggaactctattgccaatcatatcaccaacctttatgtacttctttcgtcagttgtaaagtgggggtgataatggtttccttacagtgtaagtatctagtaaatgggagacgttatacttattacagttttaagtccagccgctcatgctgtgatcttgcctgaacaaaggatgtgaaattaaggggcgttaagtcatctttgaagcggtgatgatgacaatatcctatctgtctggccgagtcagactgctgttggcatagtggtatttgcacgtttccttaattgaagggattctattaaaatcacaaattttatgtggctgtttgccagtgccatttaaaacctaatattctaataatgaaaggggaaaaacacacacacgcgtttctcaaaggcgagacatttcggcagcacaattgcattcgtgcccttggagatgaaaagctaacaaatttggggcctgtacgtccagcctgcccatggcaggttttcagtggtccactcagtgctgtggagttttgtgttgtttttcgtagtttttggttttttaaggcattgtgtttgaattcattatcgtcttttaatttttaatagctaatttttaaagctaattttgtatttttagtagaaacgaggtttcaccacgatggtcaggctggtatcaaactcctgatgtcaggtgagccacctgcctcagtctcccaaagtgctgggactacaggcgtgagccaccgcacctggtcaaggcttgaactttctaatgggccatagctcttgtagtgggctgcactcttctaaattacctggtccctgcaccatagtccaaaggtttaagcagaaacctcaatgcacttgatgttactggccctctttgtacagaggataaatatgctaattctcttccttaggagttagccctgagaaggaaaagctcaatgttgtcagatgcagcaggtcaaccccactgagggcttccccttttaaattcttcatgggtttcatcaggcttctgtgcaaaaataccagaaaactccaatgcatgaccctgatataatcccataacttcatttgccagaagaactaatagcactaaattggtagtgatgaatggtatctaatttccagtgatcatctccccatcccccatcaacgaaactgggctttcctaatgctcactaaattgttttcagtgggactacagatgctaatctcgcccaacctccttctgttttcttattttgatgatatcaaatatttggctcaggggaagataattgggagttcccacattaattaccaggaagaaacagtcaaaaaaaaaaaaaaaggccaaatagcaacatccgcttggctttctgtttattgtaaaacactgtaatttcccaaggctggtttagataaatacattttgtccaagttcaggggccgctgttttcccttgcttcgtgaaattatcaataggcaggcctttgatcttcctgatccatgcagctttgctggcttttcctggatcaaccactccagtggactccctggcctgatattccttcatcttggcttcctggtgctccttctcctccttcacggtcaacagcacgaactcagcgttcactctaaaaggatcaagggctgtatagatgcgaggccgttctttcttaagagacagggtggctgtgcccacttgtggagctagcatgcggtttggtttaatgacctgcatactggtcaggggacccgtactgcacacagccctttcaattgaactggtcacttggtctccaccctttaagctgccagagaacctggagcggataatcatgggctcgggtatggtggactgggctctaggactgtgcaaagagatcttcaagttgggctgcagtttctggatttcaaggggaatactggttcgtttcacatctataggaggattgctcaatctcaaccgatcaactgcacgttggattgattttcctttgaaattcaagaccttccttgggtatgaaattgaaggtccccagacatcagtaatttctgtttggggcctacagggataggcaaattccccggaattacgggcgtgctgcagggcgctaacagtcaggaggaattggtcaggtgacatagggattttccaagactttttctttgggtgactgggcagttttccaggagtttccaattgtccttgtttttgtgctttctccgcatcatctgctttttcaaaaaaaagaaaattttaaaaaatcggcgttctatgaaaaatattaagtacgtatgcattaagtacttgggcattcaaacttcgaagcacattgaggtctttgttgcccaacaggtatgccatcatacaggcaggcaccctgagtggtattagaaatgctgatactagaaacaatttaataaaacaaatttttttgtttgtttgtttttgtttttgagacggagtctcgctctgtcacccaggctggagtgcagtggcatgttctctgctcactgcaagctctgccttccgggttcacgccgttttcctgcctcagcctcccaagtagctgagactacaggcgtccgccaccatgcccggctaattttttgtatttttttttagtagagacggggtttcaccgtgttagccaggatggtctcgatctcctgacctcgtgatccgcccgcctcggcctcccaaagtgctgggattacaggcgtgagccaccacagccggccaataaaacaagtttttaataaaatgctagtattgagtaaagagtatattagcctctaagtgtgcatattttgaatgcaacagatgtgatttcaatgctacacatatttttgaaaatgtgaagttgaggccgggcgcggtggctcacgcctgtaatcccagcactttgggagacccaggcgggtggatcacgaggtcaggcgatccagaccatcctggctaacacggtgaaaccccgcctctactaaaaatacaaaaaaattagccgggcgtggtggcaggcgcctgtaatcctagctactcaggaggctgaggcaggagaatcactcgaactcaggaggcagaggttgcagtgagccgagatcacgccactgcactccagcctgggcaacagagcgagactccatctcaaaaaaaaaaaaaaaactgagtgaaatcaagatgtcaaaatcttccctattctccttgcaaactcaaaaagagaatttttctccttttataaaaaaaggaattgtgatgagctcattgtttattaatttgtcttttttcaaatgataatgtattgtggatctctttccaagttagtatatacagatcctcatcatacaatttttagctgtatataatattccatacaatagatttttttattacttagccattgcccattgatggacattaagtttgttaatggtcaacctagaagaaaatgcagaccccattttgggaggctggggcaggaggattgcttgagccctggatttggaggttacagtgagctatgattgtaccactgtactccagcctggggaacagagtgaaatcctgtctcagagaaaagaagaattctaacctgttcatctcataacattattatggatataataataagatcgctaaaatcatgtaaataaaagtacattgttagggaagaggtttaaaactatagagaattatagagttgtttacagaatttgaatgtctttttaaaatttgctttaaaatataatacttgtcagctaataacataaaaaagaaattcaagttattttcaaaggatggggagaagtaagcaaaaacacacgctgaataagcaaactcagagtgaaaactgtgtttccattatgattaagttggtaggcaaaaaatactcagtggaaagtagagtggtgggttattgaacctttccctcatactatcatcatcggaacacttttgtggagtgttgtctatgtagaaaagcgtgctagttcccaaggttgcagagaggtaaataacatggtcttcattctcttggaatcacgtcgaggagaaggcaacacacgtgcattaaaaggacactaagtgttgtcaaaggtacatttcactcaacaaatgtggttttttagtgcacatgccagccaggcatggtgctcgaccctggaggtgcagtggtgactaaggcacacttctgtgtcttgtggggttctgagtcatgaagcacctcatatgtgtgtaatgtgctaaatactacaaggacaggcccagtgtgacgtgggagcacaaagagaagtatctacctcaaactgaggagaccaaggattacttctcagggaatgcgtcttgaagctgagaaccagaggttgagtaagaaataagccattctgcctgttccctgctgagctcttgtttctgttccttcctcctccacctactctagtttggtggtccttaatctcctcctcatctcacttccctgcatttgctacactccacactgtctgtacctccaacccagattgcttttctgagcctagttcctctgaaaatctattgggctgcccctgcaggcagctcacattttgtgtgtattcaccccaattcactttctttcccaaatctttttccttaataccttaatttatgttccaaagtcaggcacctataagccatcctaggcactctttttctgttatctccttcatctgattactcaacagattgtgtcttttcaaccccctgatttaccctggaatctgtgccctctcacctcagtgctttagcttcagcccatcatcggttttgcgtgggttattacagcacatcccagctgacttctctgccttcttcctaaccctccttccatctgtcttccactcaactggcagataggtcttccgtaagtgatcactgtttcaccaaacatatttaagacaaaacacatatctttgctgtgatgaaaagtactataataaacatgagtacaggtatctttttgattaatgttgatttctttccttttgtgtagatactcagtagtgggattgctggatcaaatggtagttctatttttagttctttgggagatcgccatactattttccatagaggctatactaatttacatgccccgtcaacagtgtgtaagagttccctttcctctgcatcctcatcaacatcttcattttttatgataacaatagctcttctgactggggtaaaatgatatctcagtatggttttaatttgcattcctctgatgattagtgatgttgagcattttttcatataccttttggctattcgtatgtcttctttttttctttttctttttctttttttttttttttttttttttttgagacaggtcttgctctgttacttaggctggaatgcagtggcaggactatggctcactgcacccttaacctccagaactcgtgatcctcccacctcagcctcccaagtagctggaattacaggtgccagtcgctgggcctaggtaatttttttttactttgtgtggccggtttcgaactcctgggctcaagcgtttctcctgcctcggcctcctaaagtgctgggattacaagtgcgagccaacacacccagctaattttgtttttaaattttttgtagacacagtgtctcactatgttgcccaggctggtctcaaactcctggcctcaagtgatctttctgtcttggcctcccaaagtgctgggattacaggcatgagccaccatgtatgtcttctttcaaaaaatgtgatgtcatttgcccacatttcaatggcattatttgtttgtttgtttgtttttactattgagttgtttgaattccttgtacattctgggtattaatgctcttgtcacacgaacagttttaggcaccattttcaatactatattacagaggtgaacaaaacagaaaaattcttgctatcgtggagcttgcatgctagccattatacctggcaggtagctaatgcttaataatggatggatggacaggtggatggatgataagagaaagaaatgacctcctaggtgggagaaatacagaagtaaagataccaaagaaggaatacatggcatctgctgtcaaggcgatgagaaggccattcggacaggagtggagaatgagcgaagagacaaaatgaacatcaagatagagagacacgctgtagaccttgacagacagacagactttggataggtagagaatgaagcaaagaccatgtcaggcaagatgaacatggtgagcaaaaatgcaaagatgggagtgcaaaatatatgtgtaaggataaaaacaggcaacctggccagctgtagagggaaggatgtatataggagaattgtgaggaagtaaaactgggaagaggttaaggaaaatgtacagaccagactacactgtgaaggctgttctataggaactggaccttggtcagtgttgttctggagctcctgactagtatataataaggcaagagagagaaagaaaaggcacatacactggaaagaaatgaaattcttttcacaatgtgattgtttatgtggaaaattcaaaggaatctacagaaaagctactaggagtaataagtaaatctagcaagggtatagaatacaaggtcagtattccaaaatcagctgtggaattccacttccagcatgacaacatgggctgctccccagtgaaactgggctcggcagaggactcttcgataaaacacaaaagccacaaaccatgcaagaaaagtagataaactgtacttcatcaaaattaaaaacttctgctcttcagaagacacttaaaatgaaaatacaagccacagagtaggagataacatttgtaaaatacagacatgatgaagaactcatgtacagaatatagaaagaagtcttaaactcattaagaaaacaaccttaaaaatagacaaaaggggccgggcacagtggctcacgcctgtaatcctagccctttaggaggccaaagcaggaggactgcttgagcccaggagtttgagaccagtctgggcaatatagtgagacctcatctttacaaaatttttttaaaaaattaggtatggcagcatgtgcctgtagtcccaactacttgggaggctgaggagggaggatcacttgagcccaggaagcagatgttgcagtcagctaagatcatgccactgcactcaagtctgggtgacacagcaagaccctgtcaaaaaaaaaaaaaagtgcgtaaaagatttaaataggccctactccaaagaagaaatacagacgttaaataagcaaaagattttcaacgtcagtaatcataggggaaatgcaaattaaaaacacaatgagataccactacacgcctattagcataattaacatttattaaaaacaacaatacagtgctgacaagggtgtagaatacctgaagctctcgtttattgctagtgtgaatgcagaatggtacaatcaattccaagaacagtttggcagatttcaataaatttaaacaaaatttaccatacaatcccattcctgtgtatgtatggacacatgtccatacaaagatctgtacatgaatattagcttaaatatcactaaagacaacctaaacatccctcagctgatgaatagataaacaaattacggctgaaatactactcagaaattaaaaggaacaaaccactggtacgtgcagtgacacgggtgtgtttcaaaagcactatgttaagtgaaagaagacagagacaaaagacagcatgtcgtatgattccatttatatgacattttggaaagccaaaactaggcacagaagtaagatcagtggttactgggaaacggcggtggggggaggggtgcgggggacaggagggaattggctacagaggggcataagaaactttttgaaaagataaatttatatgttccatatcttgattgtggtggtggttacactatgtttacctttttttttttttttaactcagaactaactgtacacttgcaatgggtaaatttgtgtattgaaaattatagtctgttttagactagattttcagagcacttggtttttccttggggaatagaatgttgtagaacataagattttggggtccgattgcctggaatcaaagcctagctcctccgcctgcttcaccatgcaaccctgaccatattactaaacttctctgaggctctgtttcctcgcctataaaatgaggttcgtgccttccacctcatagagttatgtgagaaaacgactgttcttataaagccgtcagtaaatgatactgctgtcatcattgttactacttttttcagaattgtgtcctcagcatctctggatgttacactctgtgctaaatgctggaatatgaccagcatgacctgatccctgccttcattcccgtccggtggggaaggtagaactttagccagtgaacagttgagctctaaaagatcattctaggtgggcatcaatggtgccaaggaaagagacagaatgataatacagaacaattgggagagagcactccagagcgggaaggcactgggagggagtggattggagttgagaactgaaggagagtgatgcagagatctgggggaacgtacggtggccagagtgggcttctacctgacactataaatagaaaggccagtgtggtgagaacataatgaacaaggggcagggtggcacaagatgaagacagaagggctggaactccatgtgcagtgggagaagccagaaataagttgtacaaatggggctggtgtgatcagatttaggttaaaagaacccctcagctgcctgggtaaaatagaccatagaatcccaggagagagacttggggcagctcctggcatgacttgatgatagcttggaccagggtggtcacagcagaagtgaagttcttctgttactcagctcaaaattcaggctggctaccattgcctactcttctctgaaacgttcccgtctctattgcctatgtgtatcttcacctttgttacagtgctatagctctgtctacctgtaattcattataagggagaggagcagaggtgacattagaatgtaatcccagagaaggtgcagctcccctgttcagtcaaatcctcacagccagcaccaacagaaatacatttctgtttagccaggctgccgatgcttgtagcatgaagaataatagagtaaaccccacagggaaacagaaccccatagaattctccacctctcctctactgagagtctccttaaaggcggaatggtttgaatgcccagccatctaaatataggcttttcttttgttccctcttaatttaactgagtgattctcaaactctagtgaacacagtcattattttccagaattgtacatacataaccttccatgtactttatggatgagttcaggggattttaaaggataattttgaatgtaatatagtttcaccttagggctgacctaaataaactgaataaactgcagctccactgtttcaagaaattgaaaatgcatctggtcctaatacagctttgagtgccagtcttggtgctgcttgcctgtttgttactgagctcccttttgtctatgttgtttcaaatgatggagaaagtgaccttgaatatatgtaataaacaaggaatagtaagataattggctgtttttgaaatagttacagtaaaaaccctttgcattttaagcaacatagacattttctataatttttttttgcaaatcaaaggggaaaatgtttatagctaaaataccatttaatgagaacaaaatcaatgcaatgacattgtcatttgtttcattttcccaaggagaatacagaggacagtacttaagttttagttatgttgattgcttgtgtgaaatgctgattcctgccagcagtcgccaggtgtctctcacgctgctgggagaggaatgtctcgtcttcttcatctggttgcctccgtcactgttctagaggcttctggcactggtgcaaggcagagctgtgcttccttgagagtgtgccaagcatttactttggttatttagttctagtctgggagcagacacaaaaggaaaaaaaagaaaataccaactccatgtgtctgaggtatcacttatagtttaaaaaaaatgattgtcttatcatgtttgggaaaatactggtcttcctgttttcctcctatttaaattcatcctaaaacttccagggacacaagaaattattagctattttgaccatccattccagaaaagatggtggccttacaataattgcaagtggttaatagaaacatccttttacagcttctatttaccaaatgtagttcctgtggaagcacttgaccccgtggctttctgctttttatgtcagctctggggcctttatgatagaattatttatcagagtctttaatggctcggggccacttgatgaacttgagtacactgtacatcacatcacttaggaagcatcccagatgctcatggataaatctagagtcgtggtgcatttggctaaagagctcctgcatgtgaggaagtctggagaaaagtgctccagaggggtcacaatggagctgtgttaacctctgctgtcagcttctcaccacggagtttatccctattacttggagccaaaccactgcatctgttctccttaggctgtgtcagcgcagccacctcacagcctcagggacccacggcttccattctggatactcacactggtaagtgggacttggcagaggccaaatcaagtagtttgtttctgacacctctgagcccatttctttgccagttttatatcatcactagtaactcccttccctgtacctcttacacatcacacaggcagccagtgtccttgaacaccttccacttaacgaagctgcatatctgcttgcaacactcgtcctaataggataaaaggattaagtagttttagggtggccaagaggaggggacagcaggagacaagtggttaaaagtgaacgttcccaatatttcttctaaaatatacctcagttcttctcaggaggataaaaccaagtgttttgccctaggagattatagctgccagagtctaacacttattttggaatgtttccgggggtccttgggaccccttttctatcttatggtcttccgtgctgtaagacctggagaccaactggcctgaatggaggttgtggggcctgagggctctcccagcacctctgccagccctgtcgcctcattggttccttctcttctgacttcatatttgacaggttgtccttctgtcttagacaaaaatctattaaattcgctgctccatccagttactcttctatttctcctctttgtagccgacttctggaaagggtggcctgctcaccacttcactagttgcagctcagcttccagcctcaccattcatctctgcttttctctgtactttcactgcatttttctctctgcatggcggcccttccaaccgctcttcacttaaatggactcatatcaaaatggcaacctcagccttagcccctaggtcctccagctgagttccctgtcccaattccaaatctttatgagagaaaatttgattgctccagcttgggcctgatagttccatttccctggggcaaaggaaagggttataaggacaattaagcattagggatgggaatgggaggacaaaagtacttaaggcaaagggaaggatccagggcagcttccacgggactttacgtggcacttggccagatgtgtatctaaagctatgattctgctttgtaactttctagctataatccacctccccaactttcaacaaacacattatgtcaaattctttctgtgtgttataattaaagccaaagagattcttaatatttaccaagtcttaatttcgcttcagagatgtgtttcctagttcggttaaaattggagtttctgttcatgttctccttgttttcagagaagacagagagatgtagacaccgttcatctactatcttttatcaaacctgaggtccttcagacttatatttttaaggtatcttatatatatatttttagtgatatcctttttgctggtctatcctaatttaatatttcttaaggacgtcaaggcctactgtttcttttaaatattttagaatcaaataattattttcttcaattcatcaagagtgtattgatcacctgtaatgtacaagcactgtcagttttgtttttataatgctcaaagttttataatctgggtgaaaaactagccacatgtataaaatgcttaacagacagcataaggcagcccagaaatatgtgttgaatgaaatgaatagatcagtacaaacaagaatttctctggaaagtcagacaaagaagaaggacagagtggacagtgaaagcttcctgcaggcggagccaggactgggcctttcttcttgttatttcagagacatctgtattttgattatgtctcttttgaattatctattttccagcttggtgacgctgacagggaaataatacatgtcagcattagtttttccaacttaatggatcagatgagagtgatccataacatgtaagctttaggtgtgggctgtaagcaggagagattgcacgataagagcagagcaaaaggttatttagagaggataaattaaaacacttggaattggggtcagtcaatacctggttttgaaatgaatgatgaagatggagttttagaaatgaaatgaatggattgtttggttggcattattaacttaaagaacagggtttaggttaagtattatagggctttacaggagacatttttcaaatttactgagggttttaccagtaagcacttaagcaaatgtaaacattttgtgggctgcaggggagctgtggatattattcatcacccaggcacactagtctagcagacgggtacccagccaggctaaagctctgcagagtttctaagggttgttatgattagtctcttggtgtgtatatattgctaatgtaataagaacataaacattttataagtatagaaatttctttttttttagtgttaaccagtgaagtggcaggaagaacaaatttggcctcaacttaataatagtggtgttaatgtagagaacttgttcttaaaataaaactgttctctattaaccatggtatgaagagttcacaaaaactttttgtacatattgtcatgcttagtcattacaatggttgaacaagaggaacgctgctgggattttctgaaagttacactcccttctctcatcatgagaaaaaagaaagcatttgtgactattttcaagcgttgtgagctgtgacagtattcctagggatgaaggattcttctgttctcatctcccttttataatcagaaaatgcccagatattctaataaatatgaatatgaagagttaactgtcatagtaacttagtctatcacttgtagccaattaaaacatatgttttaggagcaaatatcttttactaataatctagggtcattttgcctaatgtctcttcactttgattcctctcttttcacgtaagacgatgtgaaaagatgggacacaattaaatgctgttttcattggttggtgttagatgagtggaagtcataccatagcgttctctcttttgcatggtttgtaaaggttcatttgggcaccattcttaagttcagagaatataaagatgaatagtgcaaagtcacttcactgaaaaaacacagcataaggggatgggcagccatggcagcagctcatgttagcatgaggtctaagaagtgctgtgagagcttgggaacagacatggagaccaaccatgtggaggggctcaggaaggtgagaacggagagagaaaatgtccttggaggagttttttgatgtctaagctgagtcttagaggatgagtaagagatggtcatacaaaagatggagagaagtgtttcagggggcaagggggccaattctagggcaaaggagctagatgcacagttaattagacacgttcacagaacagatcagagatggcaaaataatggccaatagaccaaatcctgaagaagcattttttgtttggcctgctgtgccaggctggtccttgtagatgtctgcatttgtaaacatggtccctggccaaaggtcctggtcccaaggggcaggtaaggagatggagtaagaggtcagcactatacctccgggtagctgcacgtgcacgcagctgccagtctccaaagcagcagagatggatagttttatttcccagcttcattctttataaattgtgttttatttaagcttttcaaagactctttaaaattcattgaccctatttggtgcaggtgaacaaagctattttttaagtagagtcctataaattaaaaataaggaggcagatcagagaattcaactatctggctcaatcaggagaaaggaaaggtatgtgtctgtcacgtggcaggcattgggtgttatgggatccaggagtaatggagggattcggtagttggtccctgccctcaagaaattagaaaaacagactaagagattggactacaatgctggaaactctgattttcgtagctgggacaataggaatcactcctccttaaaaattcctaagtctttgtacaaattacccttaatttaagatgaattggtgtagcataattcaggggtcaccacgtactcccctctgaataagaaggctgaatctcagtggtcagcaatgagggagattcattttggtatttttttcttttttcttttataggcaatctttcttctcttccttctagattaacaggattctttcagtcagctttcaaaactcattcagtgtagatctggtttgttttcttccttgaaaaaaattattaatataataccacagtctctgcaccgaacatcatgatgcatgcctataatcgcagctactcaggaggctgaggtgggagaatcacttgacaccaagagtttgagcattttttagagatgggaccccatttcttaaaataaataaataaataaataaataaaaaggtgtctgtgtgtgtgaaaccacaatctccacgttctgaatgtaattatgccaaatatattttcttcttacattctttgcatttcttttaaacatgttttaaaatttaattttcttttaaaataggttttgttttcccattttcttcacaatttccttaagttctgaatttacatcagtcatctgccactctacaatatctataacttgagacatgttcagaaatagaaaactcctaaataagattctggggagacattttcaaaacagttttctgtagaggctttctccagaaactcatttccaagctccaatgtgggatttacacgggaaattaaagttaaattgtcttgatttgattaaggttttgcattttcttttgtttttgaagaaaggatattttattttgtaatttcaaagtcatttattgtggaagaatgaccaagaagtatgaaattaatttttgtctaaactaattacctgcagagctgctcaaaatataaagctttcttgacttaacatttcataggcttctctgagacattacttaacagaaaggccacatttttccaggaagttatttaaaagtcaggtaatttaaattacatttattaagtgcaataaataggcaccaaattaaagcttgtttctctcttatttgttcttaatttctgtagaaaattatactttcgtagagctatgtaggggctgatgtttagtaaacaaaacaatgttatatttaaaaaggagaaaaaaataattcatagaaatgtgtggaccaatttttccccactctcaatccatcagtttcttttctacagtagccttgggcaggaaaggcagaggtagaaaaatctcaagcagtgatgctcagtagaaagacatcttaatttaaaatgtaattcagttttgtatatgagttttgaaataaatcatcattcaaccctcagcatgaaccatgaaccgatttgcatgcgtgagtgaatgaatataaaagaatttttttgttcaagaaaattagtctttttctgaccacccccatcaaatagtgctgtttttcttattcacacatttattctgtgttgttgaaaattagaactttttttgcaatattatcacaccttgttcaactctatttcagattgttcttatataaattcaatccagcaagaatcactcacagagattattaattcctctgttcttaataaaaggccattacagctactgttgcagcagtgcaagagcaccaacgtttaaaaaacatgttttgtatgtgatcaatctagcttttcaatataccactttttgtaatttggtataataaaattaaattgtaagtaaaattaaaattgaagataaaaatagtggtatattcatgtctttataagtctgacaaaataaatcaggggaaacaatttatggcaagtttatcagcccctccctccagctctatttaaataggtccttcctatttaaattattctgtcttatttcatctgttctttcttgtagctgattttacaattggagagttcacggtagttacatgtgtttgtttaaggtctgtcttcctttctagactaaactcttgctgttttgttcactgctgtacagctacacttagcatagtggctatctaggcaatgagaaattttaatgaatgaatgaatgaacaagtcaacactatgtgctcatttaacaagcactttttaagtgctttatttacatcattgtatttaattcttaagacaactctataatacctcccatcttacagatgaagaatctaaggccaacagattaaataatttgctcaagatcacacggctaaacaagtagaaacccgccttccctattgtctttttattgagcctttacctaagcaagtttgacttgaaagtttcagtcttgccattgaaagagccataatacaccctttcagttgaggaaaccaaggaccagagaggttaaataagttacccacttttaaataactagttaacttcagagtcagaactagaatgcagaccacctgatcctactcagcatgcttagttatggttccatgaggaaaccagaatttagcactaataataaaaagtattaaagtatttttaaaacatatttcttatgaaaaatcccaacagatggaatagtagagctcactctacagtggaccctcaacatactcatggcccagaatcaacaactatcaagacttttaccacacttgcttcatcttgccctttaagtacttttaatgatcaaaacacttgtagctgtatgattaaattaaaacaaagtagatagtgcaggtaagtcagaagtctaaggatatatccaaagttcctctgctaattgataacagagctagttcacagccctctattcttccactagaacatgccaagagatatataatgaaagacaactgaaagtggatgacctaaccaggccggccgcagtcagcactggagtggagcggcttatgttggctcagcatatgtagcttggccagatggggaccagcatcacattggtaatggtatagtagttatcaaatctcagagagcttccagaccacgtggattcctaacaagttcccaggtgatgctgatggtccaggagccacacttagaatcatggtgtggaggatctacccagaaattccaatgaggccctctttcctaaggtaactgagcccagagacacccaagaaggccagcttagcctttcttctcctcatcttgcttctagaaaccagatgtcagagtaacacttgaactggaagcaaactgctaaggaatttaaatgataaaaaggagaaaaaggactaataaaaaaaacatatttcacaaaaaatttaaatattgaataaattatgaaaggagaaaactcaggtgtgtatgtgtgtgtgcctgtgtgcgtctccaggcttgggatgctttcaaaaatccatctaggaatgggaagagccgatggtttttgtttttttaatcaaaggctgaatggtatgattaagagaaagagtatatagactaattgacctaaaataacaagaaatcagtctttgacataatagtgtttgagatctctgagatttagctctgaccacattttatgagcactaaggcagaaaatcatagttgtgtttaactgagatgaaaaatgaacactcttttctaacctttttctatctaaaagatagatctcttgattaaaacagctaaacttcaacaacctgaatataaccatgatatttaaagatttcatggcaaatcaaacttaataacccacatattaattgatatattctctctttattccaaaaccattattattgcttgtcctctttctacttaacagttccaaagagagtcctttactttttttttactgatgtctcattgtatacaaatattctaaagaaaatcctctagttacccctttatttaacttttttcctctgccttatttcaaacaagagttcaagtaacttgcaaatatatgtaaaatgtgacaaaatagtccagaaaaagaagactaagaagagacaaagtggagccaagaataatagaacttaaagtgcaaaccatgatcaccctcatgtcattagaccaaagagccgttcagtgggagaggagggcccgctctctgcttctaatgtgctccaccaatgcattttaggaaatctggaagatagattaaagatacaagctagctgaaggctgtttctctcaacgaagcatttgataaaaattatgtggtggtgtgcccacgattcttcttcctttaaaatgcctaacttgagcctctcttggtgaggtgaattaaacaaatgcttgtctctctttgctgacttccacatggcaggcagagtagtccttctaaaaagcagatctgatcattttcttccactttttaaaatctggaagacttcactgagtctgcatttgcccagaggtctctgtatgtggccttcctaatttctgtgctctcttgacacctcccaccctcattctactctccagatatgtggaacataaacttgccattcttctcctctttggccttctcacacgctgttcccactgcctgcaactctcttctccaccctttccgcccatctcccacccatccatcgggtctcagtttacacatcacttcttcctagaaacaccccctgtccaccacccagcataaactaggttaggtgcccctgactgccccgtgttccctgctgtgccacacatgcttgccttggccacgaactgaccaccactacagcatcagtgcccccaggacaaggaccacacctgtcttgctcaccacattatatacagttgttttggtttcagggaatgcggtattaggctatttgcataatggagtaaactgaaggtgcttttaagcccacaggaagctcctcccaggtgattgcatcccaactcaagactctagccaccccaggccctcagcagacccaggaaagaagaagctcagcaagttgtattacaccagtgtgccccacgtacagttgggagactctgggttaaactgatgagccaacaaatgagcctgagtataggtcctgtttccaagttattttacttgctttgagtctcagtttcttactgctaaaatgaggtaatgctatctcagtaaacttgtcttattttaagggttttttttaagaaactcaatactgttttttaatctattggcaaattttattttttgttttgctttgtttttaatgtcacagccagtgttgatacaggttctagaagatggtgctctcatatagtgctggtgggagtgtaaatttgtgcaaactctctggagtacagcctgacagtacgtgtcaaaatccctacaacatgtgcatatcatctgacttagcagtttcacatctaggaatttatcttcggaatttcttctaaccagagctgtgaacaaaagtctacccataagatatttatcccaacacgctttttgatttttaaaaatggaaaaagactgaatgtctgaaaaaaagtatattggttgaattaattgtggtgtatccaaagaataagccactgtgtgttataaatattaatgatgttgatgcaaaaaatatatttaatagcctggggaaattattaagatatattgaaataaatcaggggataaaaccacaatttagcatattctcaattttttttaagtagttatatcattggaaaaaggctgagaagatatcaactagtatgtttctccgaataactcatgaagaatttcttctttgtgattttctagaattgccagttttctgaattggatgtatattacttttgttataaatgttttaggaaaaatgaaacataacaggaaaataaatttcacacagtttgcaattggagtacctttgcccataacacaagaaagctctgaagtccactgattgtgggctcctcgtgccagaaggggaaggattccttcaggtgcctggatgctgagagtgatcatggcatcctgggtaaatagcttcattttcgtttgcatggcttgtcagcctacccagttttcattcatgcccttgtgcacattgatttaaacaccaaaattgagccacatcattttctgtgacttcaacaaaggtcagaaactaaacttacacataaaatggcctatctcaataaattaaattcatgtgtgctcttctaaaagggcttttcataacactaatatctttgaatccaactggcctccacagaacttgaagaaggagtaaacaaccttcttcttctttttttttttttttttttgacacaagggccaattcaggaaaaataaaatgtttatcagccacatttttctccctcccaaaataaagctagttttttagagtctcatagggaaaaaaaaaatctgttcttataagctataaattaccttattggaagaagaacaacattataatatgtgcactgctttttagccatctaaagtttcctttctgggtatataggagatgtaacaacacagaggtatctttgtaatctttcatctggaaaatcatattgtgtgccatgttgggaaaatagatggttccaggtcatatgacgtatgagggaacttcaaaaagattatggaaaaaatagaattaaaagataaaattttttaaaaaaacctatttctcaacctaatctccatcaaggtcaagacactttggtaagcagtgataccagccatttagtctatctgtaaagaactcacagagtcctgggaatttaaccatgtcaaagcattcttttttacattattaactgaagagaaatggattccctttaaagactttttaagattaggaaacaaaaagacggcagaaggagccaaatcaggactgtgaagtggatgcctaatgatttcccatccaaatgctcacaaggttgcccgtgtttgatgagaggaatgagcaggagcattgttgtggtggagaagaactctctggggaagctttctgctaaagctttgctaatttttttcaaaacactctcataataagtagatgttattgttctttagccttctggaaaggaatcaagcaaaatgccttcagcatcccaaaaaactatggccatgagctttgctcttgatctgtccgctttttctttgactggaccactcccacctcttggtagccactgctttgattgtctttgtgttcaggattgtagtggtaaagccatatttcacctcctgttatatattcattttcttcttttttttttttttttgaagaaatgcctcaggatcttgatcccatttgttgaaaatttccattgaaagccctgctcttgtctgcagccaatctgagtacaatggttttggcacccactgagtggaaagttagctcaactttaatttttcaatcagaattgtgtgagctaaaccaattgagacgtctatggtattggttgttgtttctaccgttaaccattggtccacttaaattagggcatgaaaaagattcattttttcctcacaaattgatgtggatggtttgcagctgtggactttaatcttcaacatcatctgttcttaaacaagttatccatttgtaaactgctgatttgggggggcattgtccccataaacttcttgtaaagcatcaatgatttcactattcttccatccaagcgttagcataaatttgatatttgttcttgcttctgttttagcagaattcatgttgctttgataagggctcttttcaaactgatgtcttatcctccttaatgcctcaatctagatcctgttcagacatgttataacaagttagtatgagtttattttggtacaaaaaatttttgaaatccatgcatagtcttttcataatatgcattttccatgaactttttcaagtccccttgtatacctccaccttagagaaatgtgtttcagcagctggtgagggatacagttgaggaacaaataggaaacagagggatggaagagagaaaggcaaggaatgtgtgtgatccactccatcaggatgcttggctttgaagagtgttgaagcaagaggggtattaccttgggggaaatatgaagaaagtaatttatttgatgcaggaggttaatagacagtagagatagaagggatagaatagagattagggaggagattaaataaaaacaaaagtggagggtttatctttaaaaggaatgaagacagcctcttctgaaatgggaggaaggaagtaaatctgagggcatttgtcactgttgtataagagggaagggcatctgttaaggcgtcttgggagctagagtgaacctggagccttgagaaggcaggagaagagttaaaatagtcactataaggaacgaaagtggaaatcagccctggctaagcacccgcactgttaaaccatccccttgaaatggggccagttagtataagtgtaagcctttcccagcaggagcagagacagtaggttattgagcagatccagagtgggaatgttggatggacaaggcagaatggattattgagggtgcctgagtgagtattgtggaagtaactgaccacagggttcagaagagatggcccaggaacaggtgggtggaaatgccacctcaaggcagaatgtgcactcagaagtctctcagctgtaatttatagttcttctgtcacaggcaccttgacagcaacatatcccttatattttctcattttccatcaaaattccattctgttgggtcactctttgggcacagaggctgcaggccaggtaggaaagagtcagtgctggcccctatagcagagtggtagagtggtggccagaattctccatcaagtcacttctagctttcatattctgttgccctgacttcattccgtactgtagttccagctgctgggctctcctctggccccctcccggctaaattctaactcgtcataattctacaagttagtctttttcctagaagggccctctcatagatacaggccctctctcctgccataggaacactgcaaccctgtgcatagaagggtatcatctcacatgtgtgcacatagggtaaagtctgcctctctagggagttggctgtttttaaaaccagagcaccctagaagctgcacactggtgactcttgcttgctaagaaacgtgttgtggaatctgtaatccagcagggtcactgaacactacacaaacataccttactcagaagtggaattatggcttctgctaggagaaggcaggcttgagtaacctccttaggtttctcaagaaagaataaataaacatgcatataagcaggaactagtagatccaatttatctagactctcaaaaagcctttcacaagattccatacaaagtctacttttagaagttggctcttttgagaaacaggcttataataatcattatcattgtagagttttagatgatgggtttcatttgcataaataacactgtgcgacctccccttgaaaatcccgtgtccataagtcacgttacggcactggtactacacaacggccacctggtgtttactgttgtcgggaaccggtagcatgctgagcctgtaattcattacagacattgtaatgatggcagtcagaggcacatcattgctactcatgatcactaattaagtgacgtcttaataaagtataaatacaggggaagaacagcttccagaattcaggtagtattttctgcccaaatcttccaatattgtgtctgaagttgtttgttcatgactaaatataaaatggaacactgtgcaggaggcattgtctcagtcagtcttcaaccctaggaggaaaagatgatcatttctcttatagagaggagtaagtgaaacctagctgccctatagccaggaagggacagaacctatatgaatccagaacactctaatcctgactctcttaaccactttactcttagctagcaaaatcaagaagagcagccagagctcccacaaacatattctttcttattgtaagtttgtttcataaagaggattccccatatccaggaatcagccagatcagtgctgcctctactggataggtggattatttgtactttgtcagtgccgattttaggcagtgtgattgagttgagttggagatgatcactccacgttctctgcctttttccagcccgttgctagctgtgtcctttgccacttgttgtgctgttccaggagttgccattctgaccttgggggtgaatccactcacaggagccctggggctcttcaacattttcctgtatacctgctgctacacaccactgaaaaggatcagcattgccaacacatgggtcggagctgtggttggggccatcccgcctgtcatgggctggacagcggccacgggcagcctcgatgctggtaagtgtcctgcgatgtggagtctcacatgagcacactcggtcaaggaggcatttcctccctgagctgtagcacttggttcgattccattccatcccacgttaattcttttagcaaatgtgctgatgtggcagactgaaattctgtggatgcagagtaaagagagaccgtgtcatcctggctggtgggtgcacatgacatacactttcccttgtagggaatgtctgggagaaaaaaaaggaagcagtgctgcctacctgtgactacaggtggataaagaaagtacctgaagctatgatgaaaatcacaaacgaagctaggactaacgaattcatggggcggggagaaggtacctggagctggcctccagtctcccatcaaaggggtttcatctcacgagccagcctcctgcgttcccctcttatgaaagggcagattattttcattagtttctaatttatttttatatgatttgcttaaatcgttcatactgtctatagtaaaactattgaaagattcctacatttttttggtggtatgtcacaactaaatttgtggggtgaaaatagctcatttttaccatctgtaagggaagtttcacagtctaattagtcaagtaattagtgtttttgaccgacacttaggaaggaagtggtgaggtttcctgcaatatatgtaagtacatatttttcacatgagagatcaaaaggcagttgaccataaaccgttaccctgtaagccacatttctgaaacttttcataaaagctcttacactccaatttggcaagcttacaaatgcgattacacctttaccatgattgtctcttagaatggctttaatatcctgtaaatgtcagattttaatgaatctacaaataccatattctaaaacgtatgtgcttgtgtgttctgtgataaacctaaaaccagagccccatccacgtgggaggcagtgtcagcaaagcggtggtgagcaaggaagccggcggcgctgcctggatggggagcccgaccccaccgctcatgagctgtgcatccttcgcggctgaattcagcctctttctgccactgtctcctcatctcccacatggggctaataatcttctcccctcctggagtcattgtgaggatgaaatgaattgttatttgtaaggtgctggaccatggtgagggctcaatttgggatctgtatgctgttgttatcattcaggagtcctccttcatacagtggagggactggcacagatcaggaaatggaagattttgtttggtttgtaagctgagcgatgcagccttgtcctctggctgttattttgaagactgaggcgcctgcagcctggtgggaaagagtgctggggtcctttggtgaggtttgcagtggatgagggaagggagggtttaaagcctgggcttggcatccctgggctagatgacatctgcgtgttcatcctggtttatagttgaccttcacagagcacacctgcacaccaccagccctcctgctcccggtcacgttcctcttccttagttccacctggagctcacctgacttgaccccaattccctctccctcttaacacaactgtcctcttccctcttatttccctcaaacctttatagtgattgtgcagacatttgaggtggagaccatgaaagacagtgtgggacttcctaggctgtgcatggggagtatcccccttcctcaagggtgtagccccacttcagcacttgggtccctgcactgagccacctgcctatctgatggagacacccccatccctggcaggagtgcctgaaccctattcaacttcctcaaacctggcaccaagcaacaagaaccttctctttctgggaagacccagacagggccagagtcagggccaagtattacagccttagggacaggtagtacaggagactggtatgggcagttcagtcccaggccatggagaacttggtcaccactgttgtgcagtgttgtcctagggcccaggttcttgctgagggctagaggcccttgtcacacttccaggcagtttcctcctgaagagagcctcagcatgtgcaggctggagttgcctccccggaggctagagaaaaagagcttttcaaaagtcctcacttaggagtgcacattcagacaagagcccttatttgtttaaggatagtctggatttggctaaactgctaatagtcatgtttaaaatcattttttttcttttgagatggcgtctcgctctgtcgcccaggctggagtgcagtggtgcgatctcggctcactgcaacctccgcctcctgggttcaagcgattctcgtgcctcagcctcctgagtagctgggattacaggtgtgcaccaccacacccagctcattttgtgtttttagtagagacagggtttcgccatgttgcccaggctgggctcaaactccaggactcaatgatccacccacctcggcctcccaaagtgctggaattacaagcacgagccactgcgcctggcctcaagttaaaatgcttttaaatgaatttctgttcctggagtgagtgccatgtacctagggtgccaagaaggtactctgcacacagatgtcttgaaattcagtgtttttgtttgtttgtttgtttgtttgtttgaagcacagcttccaaacccaatattactattgctgctggcaatgaggaaagctctctaatggggaggcctcttctccttcatagaccctccacacagacaccacacactccatgctgtcactccaggatctctgcacacactctagatgtagacagaacatctatactttataaagtgagatgatttctaacttctctgatccccactttaatgctccatagacaaaagagctccggaacttgccctccctgtccccttcctgtgcccccgcagcactgcctccctaacccaccagttttacaagcaagcggctttcccctttctgtgctcttcccttaactataaacaagaaatgaaaatactctatacaggtttccttctgcttcaaaaggctgcaatgttaagaccttaaccaacagcataaactctctagaaaagtaacttgttttggctggaactgctggaatggaatgcggggtgtcattccaataagaaatcccttttagacttccgttcactcaagccgaaagaaaaacacctttctttggatgctgtgagtaaaaaatggccagagttttttttttttttttttttttttagcagcatgactgaaaagtgttcattaactgagccttattaccaggctgccctctttaagatggtaaataatactaataaagtttcactaaaaggaaggcaatatggtttagggacattaagagatgtctcaagtgagcttgaagtagaatttacaggttagttctatttggttattttcatataatagcaccctgagtctacgcatatataaagcacagtcctgtatacaatgcagtcagtcatggtactggttttgtaagctcaccagctcagctttcccccactgtaccccctgctgctgccaccccccactctcctatatgtctctttgcattagaagtgaggcatcaaagatagctgatagagctctcaggcagccaaaggcatgatcaaagagcaagcaggggctgcacattggtagaactgtggtccttacagaagcgttatgttgcacccactgcaattcccacaaacacctaggatgaattaagagtcaaaacaggccgggcgcggtggctcacacctgtaatcccagcgctttgggaggccgtgacgggtggatcacgaggttgggagttcaaggtgagcctggccaagatggtgaaaccccgtctctactaaaaatactaaaaattagccgggcatactggtgggcgcctgtaatcccagctactcgggaggctgaggcagagaattgcttgaacccgagaggcggaggttgcagtgagccgagatcgcatcactgcactccagcctgtgcgacagagtgaaactatgtctcaaaaaaaaaaaaagtcaaaatgaacagttgattgcttcctgattactaagttttgtgcaaagccctgttagtccccaccacaagactattgctccacccagccaaaattgtagagaggcattgcacactctctcctcctgacagcaaatccagggctggtatcccaggggaggaaaaaaatcaaaaaatccaacagaatcactcacagttctgacctccacacctaccacccacctgttgccctgaataaagaaggacagcacaggatcgcctctgccattggcttttatcaccttcatacagttcccattgaagaaattgtaaattcggatcttgccatctgcacaggcgctgatgacccggaggaagagaagggacacgtcgagcacctctctggaagggaacagagtagcaggcagtacccatcctctcataaaatgcctgggtttgtttgtaggttgggagcattttgtgtgtgattgagcggcactggccataactggcctcaaaatggtgtttgctgccttttttttttttttttttgagatggagtttcactcttgttgcccaggctggagtgcaacggtgcgatcttggctcactgcaacctgcacctaccagacacaagtgattctcctgtctcagtcttccaagtagctgggattacagtgatgcgccaccaagcctggctaatttttttgtatttagtagagacggggtttcaccatgttagtcaggctggtcatgaaatcctgacctcaggtgatccacctaccttggcctcccaaagtgctgggattacaggcatgcgccaccatgcccggcctgctgtcattttataattgtggaagtaaaccgtgagcttctctcaagacatacctcttcccattctgcagctactttccctgcaattaggtcacagggccacaagatgacaaaacaaaaaggctgatgtcacaatcttttttttttatctaacatatagatgatcatgtttgtctcttgcaatttgattcctagagtttacttatacaatagtcatgctgagaattatttaatgttttgattctttttaaaatagtattattggctgggcaaggtggctcacgcctgtaatcccagcactttgggaggctgaggcgggcagatcatgaggtcaggagattaaaaccatcctggctaacaccgtgaaaccccgtctctactaaaaatacaaaaaattagctgggtgtggtggtgggcgcctgtagtcccagctactcagaaggctgagacaggagaatagcgtgaacccaggaggtagagcttgcagtgagccaagattgcgccactgcactccagcctggcaacagagcgagactctgtctcaaaaaaaaaaaaaaaaattcaatatcttctcaaaacccccagtttctatagttacttcacaagaaaaacaagggagagtggaagaggctaacagtcagacagagaagatggtggggaaaaatgggtcccaggtggaagaggagggaagcagagagggtgaggtgcagagaacacgatgtctacagggagcagaaggtctgccaatgattgcagtctaggctatgacggggaagggaaggacaccaggttcatcgctccgggcttcacaggcacctacttgggatgcttgaaggccatcaggcagcgctcgtacttccccaccatgctccaggccatgaccaggccatcagtgcttcctgagaggagatgccactggtcaaagaacaggcatttcacagctccctcgtggccactgagagtctgcaagaaaagataccactgtcttcaactcagactgtgactcctccaagaaccaaagctgagccttcttcagatgaatcccaaagccaccccccaaccaatctgtgactgccattcactcggtaggtacctgagctaatcctgcttttgctctaagaaggccaatggaggccgggcgcggtggctcatgcctgtaatcccagcactttgggaggccgaggcgggcggatcacaaggtcaggatattgagaccatcctggccaacatggtgacaccctgtctctactaaaaatacaaaaataagctgggcttggtggcacacacctgtaatcccagccactcgggtggctgaggcaggatattcgcttgaaccagggagatggaggttgcagtgagccaagatctcaccactgtgctccagcctggtgacagagcgagactctgtctcaaaaaataaataaagaaaaaaagaaaagaaaaaataaaagaaaaaaagaaggccaatggagtccattccacatagagctctctctcgggttaaggaggaatgggatcagggtggggccttgctcctggtgggtctgtgtttggggcagacactaccttcttggagcactagagagggccagaaatcactgtcctttgctgtgagaaggacgaaggtaaggtgtgccatcccagctccttgccagaacccagagtgcacatgggccatccctgtgcctgcaaccgctggattggccatagtgacaagattggtggggaaattccacaggccaagccagccacttttcactgtgatcctgtgttcctgctgcaaatcatatatcaacaccacccgctaaggctaggggttccgatccagcaagaatatgtttcatgaccatccaatcactttcaagaccatccatgttctctcttcattagagagcatggagaaaaaaaattctctgttcatcccccagtgttttcttcttaggaaaaaatgcttcgttcatcccctcaccccatgccagaatgcaatactcttttttttttttttgagacgcatgatctcagctcactgcaacgtctgcctccctgattcaagcaattttcctgcttcagcctcccaagtagctgaggttacaagcgcccaccaccatgcccggctaattttttgtattttcttttttttagtagagacagggtttcactatgttcgtcaggctggtctcgaactcctgacctcatgatccgcctgcctcagcctcccaaagtgctgggattacaggtgtgagccactgcgcctggccctacagagtgcaatactctggaggagaaaaaggtacttcacctccactgctgttagaaggccctgagcccatatctcatgctgagtcagaatgcagccttcctctaccaaccccatgatactgtgggtcatgatgtgggcggtggagcccctaccctccacggactctgaatgcctcactttggggccttcccctttagagcttcaggactgtccttcttgaaggccatactcagttactctaggatgacctgaggagctaggtagggggagcccacccatctcctccccagtgccctttccgccaaggtagcccactgcccacttacctttaccaactgggccatggcaatgtgccacactttcaccagccctcgctcacagctgctcacaatgtaggtatcattgatcctggtggccaagatggggtctttgtgtctaaacgtcttcaggcacttccctgtgtctacatcccatactgaaaaggagggagacagaggaagacatgggagtggggaaaaagggggaaaaggaaaggttacagtggagttctgctccccatcacagaagcaaagactcatcgagcccatcaagtcagattctagaaggacttcccgtggcctagcacctccgaagagcaggctcaccaacagctcatgtgcccacagcacagagcgccctgaatacaggtggttgagggagcccgcaatccagaagaccttggctatggccctggaacttagccttgaggcccaagtgctagacagctcatctctaatcagctgattcctcaagcctgaaaaatgcttgctatcgagtagatttcataaaaatcatggcatacagcttgagtaggggcaggtaaaattaaaaaaaaaaaaagaaaatcttggcatacatgtagtgttgtcatttttcccagatgttgtcttcctgacccacaccttctatccccaaaatgaaagaaggtcatctaccctcacttacatttttaaatacttctgaatctgacttttcaattttatggagaaatggtcacagctaggggtgggtttactgctgcttcaacacagactgtgttagagcaactgcctggcatattctagtggggatgagagtgggtgggtggcagaacagggttttctaaaatgaagaagttgatgccgggcccagtggctcatgcttataatcccagcactttgggaggccaaggcgggtggattaccaggtcaggaaatcgagaccagcctagccaacatggtgaaaccccgtctctactaaaaaaaaaaaaaaaaaaaattagctgggcgtggtggcgtgcaactgtagtcccagctactcgggaggctgaggcaggagaatcacttgaacccgggaggcagaggttgcagtgagccaagattgtgccactgcactccaacctggccacagagcaagactccatctcaaaaaaaaataaaaataaaaaaggaagatgttgaaagtgatctctatgaattcaggaatgaaaacattaaagtctccttcaaaggtgctccccaaaagcaccttcttcctcaggcaacaggacaagtggtctgagacaaaatataacaacaaccagagttgacacttacatggcactaacagccggcgatgactcaaggtgtgtgacatgctcatcgtcacaagacaagtactattattattccccactacacagatgaggaaactgaggcatagagaagttgggttgcctgctcaagtcttgcaggtggtgagtggcagagccgggatttggacctagggagtctggatccagaggccatgtgcttaatcatttctgctaggttagccctaactatgtaagtatgctttccttcacttatattttatgtatatatcttggcccatttataaaattatcaatggggctctagtgaggattaaataatgtatgttaagcatctgtcacaaaactggtactcagtaaatggcagccgttgttgttcatggacttattatattccccactatatatttatgtatctgcttccattaggagacaatgagccctttgaagaaataaaaagttatatctaaagggccatatcctattattttttttttctcctcagcacttagctcagtgtgtggcttgctgtaggtattctacagacggttgttgaatggatggattgattgatagatggaaggaaggaaggatgggtgggtgggtgggtggatggatggatggatgataaagaataaatgagtgcctgcctatagaaatgagcaaaacaaagcattttggtaacctgtgggtcgggggaaacttcttagaaaatttaaggcacttctttctcaccttttacctggcaatctcttcctccagatacgagcctgttcttacacaagtccatgcaagtgatagtcccctggtgaccaccgaagattcgtgtgcaaaccccacttttcagatcccagtatctgcaggaatcaggccaaaagaatgtgagagttcctgagggcccaaaggatcatactgcgtagaacccatgtagataattagttagttgggaggcagcagattctcatggttcagcttagagtcaggggcctggatttgaatcccagctgcagcacctatttggtgtaactttgaggaagttaatttctgtgtaagtttcctttcctcattgataaaatggaaataataataagagtcgttggtcaggcacagtggctcacccctgtaatcccaacactttgggaggctgaggcaggcggatcatgagatcaagagattgagaccatactggccaacatggtgaaatcctgtctctactaaaaatacaaaaattagccaggcatggtggcgtgcacctataatcccagctactcaggaggctgaggcaggagaattgcttgaatccggcaggcagaggttgcagcgagctgagattgtgccactgcactccagcttgccaatagagcgagactctgtctcaaaaaaaaaaaaaaaaagagtatttacatcatagggtttttgtgaagaattaaatggactaatacagtgattgtcaatcttgggtaacttctacccccataggccatttggaaatatctggagatatttttggtggtcacaagccgggaaggaggtgccactggcatctagtgcatagaatccagagatgctgctaaacatcctacattgcacagggcaggccccacagtaaagaatttcccagccccagatggcaatagtgccaaggttgagaaaccctgcaccagtggagataacactggaatagtgactaacatgtacaaaatgcttgatcagtgtcaggtggtttttagatagaagcgtcctgaatgaccaccagccttagaatccatggcactgattccacggtacagtggatctgcaaacaagagcaacagaatcctttaccaatcacttagatccaaaatatttatgcacatatagggcatatctaagagatagatgggagcaaagatgaattatctgttttttaacaagaacacttgcccaaggtctctcaactgccattgatgcttccgcttcagctaggctgcttttgagacaggacaaagcagaatgctgagataatggttctggagaaggctgcctgaagtccattcccagggccatcacttactagctgtgtgattctgggcaaattactgaactaccacttacctcagtttcttcatctgtaaactgagaataataattgtacttacagccgggcacggtggctcacacctgtaatcccagcactttgggaggctgaggcaagcagatcacgaggtcaggagatcgagaccatcctggctaacatggtgaaaacccgtctctactaaaaatacaaaacattagccgggcgtggtggcaggtgcctgtagtcccagctactcgggaggctgaggcaggagaatggcgtgaacctgggaggcggagcttgcagtgagccgagatggcgccactgcactccagcctgggtgacagagcgagactctgtctcaaaaaaaaaaaaaaaatgtacttacttcacagagttattgtgaggcttggcacataaaaacgattaatatgtctttgtagttttttggatatgttaaagctttttcttctaatattcccaagggttttgcagccttaccaatgccttaccagtttctcagagcctacaatgcagccacagtgcattgaatgatggcacagtgctctgaaagaaagcatgttttgaatttctgtttctagcaatatggtggtatatgtcttcaggttggttttttaaatttatgcaagaaaaggtatttgataaatacttttagaaaaataggaaaagaaggaactttccagatttagtaaaaggtataagccaaagtcataacagcaggtattatgctcagtggagaaactgtagatgtattcccttccagaaggggaacaagatgaagatgcccactctcactgctactgcctgccacagcactggaaggcctaggcaaagttagaagaaaagaaaaacaaaaggtggtataggcattagaaaagaagataatatattgtcggccgggcgcggtggctcatgcctgtaattccagcactttggtaggccgaggtgggcagatcacgaggtcaggagattgagaccatcctggccaacagagtgaaacctcgtctctactaaaatacaaaaaaacattagccaggcgtggtggcacatgcttgtagtcccagctactcgggaggctgaggcaggggaatcctttgaatcagggagtcggaggttacagtgagccgagatcgcgtcacagcactccagcctggcaacagagcgagactccatctcaaaaaaaaaaaaaaaaaaaaagataatatattgtcatttgcagttgataggattgtctacatagaaaaaccaattattggccaggtgcagtagctcacgcctgtaatcccagcactttgggaggccgaggcgggcggatcacaaggtcaggagatcgagaccatcctggctaacacggtgaaaccccgtctctactaaaaatacaaaaaattagccaggcgtggtggtgggcgcctgtagtcccagctactcgggaggctgaggaaggagaatggcgtgaacccaggaggcggagctggcagtgagctgagatcgcactaccgcactctagcctgggcgacagagcaagactccgtctcaaaaaaaaaaaaaaaaaaaaagagaaagaaaaaccaattatgaaacatacatgcttttagaactaataagagagtttggcaaggatgccagacacaagatcaatttacaaaaatcaattgcatttctctatgccagcaataactaatttgaaaatataagcaaaattaagataccattcacaatagtaataaaattataacgtgtacagcattaagtaaaaatacacaggacttttatgaagaaaactttaaggctctaagaaagaacacagatgatctaattgagtgtgtttaccaaactaatctataaattcaatgcagcccaaataaaaagtctagttaggttttattgaaagttggtaaacttactccaaaaactcaaaacttatatactatagctgttacataaaaaagaaaagtgaggccgggcgcggtggctcatgcctgtaatcccagcactttgggaggccgaggcgggcaaatcacgaggtcaggagatcgagaccatcctggctagcacagagaaaccttgtctctactaaaaatacaaaaaattagccaggcatggtggcgggtgcctgtagtcccagctactcgggaggctgaggcaggagaatggcatgatcacggaaggcggagctggcagtgagctgagatcgcaccactgcactctagcctgggcgagagagcgagactccgtcttaaaaaaaaaaaaaaaagaaaagtgaaaagtagaatttccctcccagtcacattttaaaacattctccaaatgcatacctaaaaacaaaacaaacagttttcaaggagggggattttgattaaaaacagaaagacagtggactagatcagagagctcagggacattctcatgcacatatgggaaatttccatgtgataaagatagcacctcaaatcaatggaggaagtggcaggttatatagtagttgctgtgggggagaaactgctcacattattcatttatgaataaatgaaatggaaactctacctaacgccacatacaaggttgaattgcaaatagattaaaaaactgaatgcaaaagataaaactgtaatgttgatagaagaaaatattagaaaatatctctgtgacctagaagagggaagaatcacagaaatgaggaaaaaaaaaaccctgataaactgatattttattacattcatattgagatttttttttttttttgagaccgagttttttttttttttttttttttgagacggagtctcgctgtcgcccaggctggagtgcagtggcgcaatctcggctcactgcagcctccgccccctggggttcacgccattctcctgcctcagcctcccgagtagctgggactacaggcgcccgccacctcgcccggctaattttttgtattttcagtagagacggggtttcaccgtgttagccaggatggtctcgatctcctgacctcgtgatccgcccgcctcggcctcccaaagtgctgggattacaggcgtgagccaccgcgcccggcgagaccgagttttgctcttgttgccctggctggagtgcagtggcacctcccaggttcaagtgattctcctgcctcagccttcctgagtagctgagattacagtcatgtgccaccatgcccagctaattttgtatttttagtagagacggggtttctccatgttagtcaggctggtctcaaactcccgacctcagatgatccgcctgcctcagcctcccaaagtgctgggcttacaggcgtgagccaccgcgcctggcccatattgagaatttttgttcaacaaaattcatgtagatactatgaacaaagttaatagatagtcctggcaagagggtattctccagcagatggcctttgggcttcatctgcaccgttggctctcctgggtctccagcctgctggccccacactgcagattttggacttgccagccaccttgatcacacaagtcaatgctttatagtaaatctcctatgtatatacacattgtattggttctgtttctctggagaccctgactaatacacatatgaaaaggtgttcaacttcattagtaatcaggaaagttaaaatttaaaccccaataaaacacagtgggttttatttaatacccatcagattgacaaaactgttagactgtcaatattaagtgttggtgagaatatataagaagagatattctcatatgctgccaatgggaatgtaaattaatacaaccacattggaaaacagtttagtactccttcctagaaattcccatactaagaatatacctttaaaaaactcatgcacatgggcaccaggggacacatccaagacccgtctctggcagcattctttgaaataattaaaaactagaaacaagggctgggcgcggtggctcacacctgtaatcccagtactttaggaggccgaggcgggtggatcatgaggtcaggagatcgagaccatcctggctaacacggggaaaccccttctctactaaaaaatacaaaaaaaaaaaaaatagcctggtgtggtggcgggcccctgcagtctcagctacttgggaggctgaggcaagagaatggtgtgaacctgggaggcggagcttgcagtgagccaacatggcgccactgccctccagcctgggtgacacagtgagactctatctcaaaaaaaaaaaacaaaaactagaaacaatgcaaatgtccaccaacagaaaaacaaataaatgagttatgatacaatcatccaatttaatacagtatctcagtgaaaataagttaattactgccacctgcatcatataggtgaatctcaaaaacatagttccatgtaagaatgaggtaccaacaaatttttaaaatatgattctttttatgttgagttcaaaaacaggcacaagtaactaatacttctggagatgtataagaaggaagcaaaaatgataaagaaatgcaagggaatcattagtataaaattagaataatattacctctggttggcaggaagaagcaagaagagaagggcacagtgggagggttagggaatggtggtatcttatttcttggcctgagtaatggacgcatgagtgtttgttatattgtttaaaaatatacatatgtggttgtttttgggtttttttgagatggagtcttgctgtgtcgcccagtctggagtgcagtggcgcgatctcggctcactgcaagctccacctcccgggttcacaccattctcctgcctcagcgtcccgagtagctgggactacaggtgcccgccaccacgcccagctaatttcttgtattttgtttagtagagacggggtttcaccatgttagccaggatggtcttgatctcctgacctcgtgacccgcccacctcggcctcccaaagtgctgggattacaggcgtgagccaccacgcctggccacatatgtgtttttaaagcactattttgcctctatagtctgtctcaaacccataaaaaaccacgttcccctgaaagaatctgtaagaacaaatgtaaattatttcttcctctaagaatgctaataaagaaaatttttctgatttgcagtcatcaattagaaaatatatctgataactgttataaatccatctcattcaaatgttaagcaatatatacattcctgactttttccttgccaaaaaaaaaataagctgaaggtattctagaagtcagtatcttctaggaaaactgttaactataaaaagaagaagcatgcacacttcttccatgagctgcctctaggccctaggtgggacagggatcatgatgtctttggactcctcacctgatacttaggtcatagctcccgcttaggagaaagttttcctcctcacacaggaagagggcccggacactcccagcatggcctcggaattcaacgggtatcgctttcacttgtatgatgtccagaagatggatctttcgattagatgacacagctatcagatctcccccggaatagtggatgactcggttttgatcccacctgagtgccaggggaaaaggattatccatgaaagaagagtcagtgtccctcctgggactgacttagccccatgacttttgcctacagcagtggtgtaaaggaaaatccagggcctttcaacaagggaggcagcagaaggcaaggttgagaattaacaggctctgagggatccccactctcatacgatgacaaaaatccatttccgttaaatttaaaaactagagacacaaggcaattttttaacaattctgtaaatgtatgctaaatccccaagagagagaacagagtatgtggcattgcccggatttaattgatcacggaaaccttttttcttggaaaacatcagaggaacacagttgggaagtcctgtgcacactgtatttcttttcttttgttttttcccttaatcaatatccagtgaccatatattaggttcaaagtcctgtgctagtagatatcacaggaaatataaataattatcagataaggaccttacttacaatgagcttattgtcccataaaactaggtgagttgaattaatctttcaatcataggattattagcaaataggtaaagtatgaacaggatgaccaaataatgtattgtccaaactgagagttttttattgtgaaaggggacactatttatttatttttagagacaaggtcttgctctgtcacccaggctggagtacaggggcacaataataactccctgtaacctccagctcttggcctcaaacgatcttcctacctcagcctcccaaagttctggggttacaggcatgagccaccacgcccaacctggggacactattattaatgacactaggactgcagactagagagggattgttccaataagcagggatgtatagtcactctaaatatggggagctttgagaccaatctgaccagagaacgaaaccccgtctctacaaaaaaattcagaaattagccaggcgtggtggcatgtgcctatagtcccagctacttaggagactgagggaggagaatcgcttgaacccaggaggtggaggttacaatgagccaagattgcaccactgcagcccagcctggacgacagaatgagattcactctgaaaaaagaaatatggatagtatggtgataattgttctttaaactacatatatatgtgtgtgtgtatatacatatatttttatgtatatatatatacatgtacatatatgtatatgtgtatatatatatgtgtgtgtatatgtacacacatatatataaggagcaattcttgatatttttgcccttattccgtttgtcatacctagagttcaactagtcaccatctcttctaaagagcagttatcaccacactaagcataaaaattcaactttgcctttcccctatcttatctgttctgtcttccccatactgactgttctattgtcaagatgcaatttgttaataagattcatggccaaaaataaagtagaagtggactttgcaaaaccttgtgaatataaagtgaagtcctaggcctaaaatatggcagaaagttgcttattaaaggaccttcgtctctcggcatattgaaatgatgtcagagtatgcaattataaatacgattgtcatatttaccatgggaagatatctatagtactttgctgggctgggttacagaaatatgtgtaatataacaccacttctactaaaatatgtgctaagtatgcaaagaaaagaattctagaagggtagacatcaatattaatggtggttattgctaggtgatagactacaggaaaactttgcctttctctatacattttctggcatttgaaagattttttccaataaccgtatattatttctaaaattaataaaacaaaataaagatatttcaaaaaataaagattttatgtgtgacttgtgcaaaaagttgttggtcagcatacccaaaatttagaaagggaaagtgtcctttacccactgccaagaatggtgcaaaatgaagcaggtattgtctacatgggatcatgtgcgagtttagggctggagcttgaggtgaggagagcttgcctttccatgtacacaaaggtcagggaaatcccaaatgtcagtgtggataactcaagcgtccctagagacccagattctgaccccagtacctacgtgtcagagagaatgcgaacattgtaggtcccacagaaaacatttctctcctccatcaggacctgctgcgtttcctcgttctggtatgcagtccacaggttgtactcattctaacaagggaatatttgaagttaaagctcagtggtaacttcaaatacccacagtcccagagcccctagggtctccctggtaagggcacagggctcacagattcttcctctgaaggctgaggctgctgctctgcagagaagggagcagccagtgagcaagcaccaaaggaaaccatgagttagaaaatgttgggtcaaggttcttaattcttctttcatctctttgattttccatgtgccctgattccatgaactttcaaggctgaattccaaatgtcaccaataacacaactttttcaaaaatcagctcacaaagggtatcctcacaacataaagtcacaggtgccctttgaccgaccatttcacagaagtcggaacgtcatatgtatattacatctacctgatagtacaaagcacactcaggggattttaagccaactgtgaaattactgctacacatgctatgctatgcatttgcatttttttttttttttttcagacggagtctcgctctgtcaccaggctggagtgtagtggtgcaatctcagctcactgcaacctccgccctcctgggttcaagtgattctcctgcctcagcctccagagtaattgggactacaagcgtgcaccaccatgcccagctaatttttgtatttttagtagagacagggtttcaccatgttagccaggatggtctcgatctcttgaccttgtgatctgcctgcctcggcttcccaaagtgctgggattacaggcgtgagccaccaggcccggctgcaatttttttaagacggagtttcactcttcttacccaggctggagtgcaatggcatgatcttggctcactgcaacctccgcctcccgagttcaggcaattctcctgcctcaacctcctaagtagtggggattacaggcatgtgccaccacgcctggctaatttttgtatttttagtagcgacggagtttcaccacgttggccaggctggtctcgaactcctgacctcacgtgatctgcctgcctcagcctcccaaagtgctgggattacacgtgtgagccaccacgaccagcctgcatttgcatttcaaagttttcatacatctgcaactttcatttgtccttgtagctgccttacaaagtagatcacttgccccacaaaatgttctcattattttacagataaggtatctgggactcagggaaaggaaatcattttatcaagtcttgacaggggcgctttcatttgcttcccagtctttctttatttccttcctgcctgcctgccttcattcgtcctccctccttccctccctcctttgcttcctctatcacacaccttctggcattccagacatgctaaattctggcatagatgactgaactagactctcagttccatttatattccctgccatattctatcctcaaatagccagaaataacagtcccattagactagcaggaagaaaaagcagaatatatttatcttgaaggcaaagaagaacacagcatcatgtttgcacctgagagtcctcttggggacatctctgaagtctccttccaaaccttagccttctgctccatgcctttagactcttcctcagatgccctctttcctctgctccctctccttcttaatctttaaccatgtagtctatctctgctcagaagaatctgccaacctgcctcccctccagtgtccagggagttttccatatcccagcctgaattaaataatgccgccctggattctcccaacccaggtgagaattcattggcccttgctcatctcctaagttttgtgagcccaagaagccacatggtggagtcattgggaagggaaagacctgagtttaaattccagctctgccactgcccagctgtgagacctcggccactttctcacaccatatccttcatttccacatccataaactgggagcaacaacacctcctcgatctatggtgaaatcaagtaaatgctgtatgcagagctacgggcatcaggcacacagtttatactcatgctattactcaccaccctgagaagcactcacctccgcttttcccaggagactctgtaactgcttagtcttgctatttcatgtgttctccatactgtttcacctgcttctctgcttctctcccttttctctctctttctttctttctttttttttttttttttttttttgagatggagtctcgctctcttgcccaggctggagtggtgcagtggcgtgatctcggctcactacaacctccatctcctgggttcaagtgatttttctgcctcagcctcccgggtagctgggattataggcatgcaccaccatgcctggctaattttctatatttttagtagagacagggttttgtcatgttggccaggctggccttgaactcctgacctcaggtgatccacctgcctcagcctcccaaagtgctgggattacaggcatgagccactgcgcctggccccttttcttaaattacacatgtaagaattaaagaaagaggagagaaaggcgaagggtggcttgacagtcaacaggtttatttcaaatctgggagggaattctgaccgagttacatcagaagccgcactctcttacagactaagagtctttaaggattcagggtgggagagtttatcagatgcttggactgcttctgtgtctctttgttgtgcttatctgggagggagagttgtgtgtctgtccccatacatctttctgcagctgcaggcatacccccaagtctgctttagcttcactatcttagtgcacttgaatggaaaggaatgtgctcatgatggcccactgttttacttgggcccactgtatgagggtgaagtttggtagttacccaagagactttccccccacatccctctgtgccctagatgtcttatctgtgttttactgtctgttctttctggctgcttgtagttagaagagatttccttgaaattcatgagactagaaagggacctggaacttaaagtggcggtgtttgtccaagatgacagtacaattctgtcaatacagtccagttctgtcaaaacttcctagaatgtcaaacactggctgggtagtccttctgttgggccattactgactgtatcacccaaggaagaagggtgttctttgtgttatacttaaaacagcaacagacttgaaaacaaaagcaggtccacgttcaaatgaatacctctttcactcagctggctgggagagcttgacctctctgcgcctcagtttctttatctataaaatgggtgaagggaccagctcagaaatgaaaaactgcaggtcaaaggaaatccagaaatgtgttttcttttttttttttttttttgagatggaatctcactctgtcacccaggctggagtgcagaggcgcaatctcggctcactgcaagctccgcctcccgggttcacaccattctcctgcctcagcctcccgagtagatgggactagaggcactgccaccatgcctggctaattttttgtatttttagtagagacagggtttcactatgttggccaggctggtttcaaactcctgacctcgtgatccgcccgcctcggcctcccaaagtgctgggattacaggcgtgagccgctgcacctggcccagaaatgtgttttctttggcctatgtagtttttaaaactgcttttaaatggttgccagcatttaataaaagcaagagatttcacataatacctcaggtttctatcttccaagacttagatggtctagcggtcaggggcctcaagacaatctctcaagacaataattagccagaactgatgagcagctggcccttcagatgcaggtgaactgtccagtccatgacagccacaccgtccgctactccccacaccacccgtctcctcctttgtgtcacctgcctggcccctacaggtcatatgaactagatgctctctctggatgcttctgtttctcaaattctaatttaacatagctgccttatgggaagcgacagtcaaaccatccctcatcaactatccttttggggccaattaaatagacttcaaaatagactttaagcaggtgggggggcgcagaaatctaatggttttaggaatatcaaccatgccttgatagtcaaagcaaagagctcgaagagtcttccggtcactcttcattattgcccaagaactagtggaaagggctatatttaattaactttccccttccatcctagagccagagtaaacctgaaagtgagggatgagggagccaaattcatctaggccctaggcattctggaaccagccctggccctcccctcgggtcctcctcaaattcctgagcagcagatgctggatcctccagaggcatgggctgatggggttgctcctggcctctgaacttgccactaaatgacctggtgccatggacacaaaacacggccaggggctttgaagtaaggaagaaccctgagaagacaaccaaatcaatccacccatccaacacatgagtaaagcaaggcttaagaagaggaagtgtcgggctgggcgcggtggctcacgcctgtaatcccagcactttgggaggccgaggcgggcggatcacaaggtcaggagatcaagaccatcggggctaacacggtgaaaccccgcctctactaaaaaaaaaaaatacaaaaaattagccgggcttggtggcgggctcctgtagtcccagctactcaggaggctgaggcaggagaatggcgtgaacccgggaggcggagcttgcagtgagccaagactgtgccactgcactccagcctgggtgacatagtgagactccatctcatttaaaaaaaaaaaagaggaagtgtcttgcaagtcagtagcaacacagaactctcgtcttccttaaggagtgtcacctgccgtgatcctctgtcctcactccagggctgagtctggacctcagccttcaatggcaattagaatgagacgctcacagctacttgccccagatgctgttggaacccaccttcgttctcaacttccacttcggatgtttcacacgcatgctcttcccgtcatctaccattttaggaactgggatagaaaccttattggcataattaggatcaattcctcttgtataggacccctggaaaaacaaaaaaaaaccaaaaataaaaacagaaaatggcttctcttggctccaactctgcaggaggaagggaaaaactagttcttggcaaaatctgaaggatgggtaagccctggctgcagcaggcaggcccacttctggccagttcctctggcagtgtgtgcagatcgaatggaggagaaaaataaacaccaaatgccacagggggaccagcaaagatggtcagactgtcgccagcctcaccatagctgctgcttctcatcctctgtcctctctgctggggaaaaaaaaaaaatccaagttaccaaaatccatggtttagggtgagacttctggcaagaaactgagaagtaaaaatgctggagaagactgccattggggaaaatttcattttaacttaaaaaaatactttgcagccttataaacatctgtgctccatatgaggttgatgcagagacacatttatggctttcttgctgcataagctgcaatataactccctgggggctgggggttctctgctttgtgaggtgttggaaaggctctgtctctctgctcctgagcggtctctatccctattgtccttgtgacatgcactgacaatgaaagagtactcagttattaacaggagtttggaccaaaaagaagggacccaggaagcctaaaaggccacaaatgtagaggaggaggccagctaagggtttactgaaaggtccacagtcatatcagcctcaacacgaaaatgaagctggtctcagacattcccctttcagacttgcaggaagtacctgcaagaaggtaatctggttctgaatgaagccgtgcgctgacaagtccatcttgacctgttgagccatggcggcccagtgctggctcacagaggcgcacttgttcagggtgtgtctatccagcattcctggaaaaaaaaaaaagatggacccagaaaccccagaactgggccaagaggggaggtgtctgggaaatcccctcatacaccccagcatacttagaatgtacttggagaggtggatgggcaggtaacggatgaagtctcggtatttgctgaacccagaagacaggtctctgatgtcatccaggtcaaccaatagattgcagggatcgtaccctggcttggttatgtctgcttttccagaaaacagcctattcatttcggatatacaccggagtgaattcctccatggttcctctagagtgaagccggagaaaggtacgtggttgagttggctctgtagaaactccaggccgagaacaagtccccaccaaaagctctcccacaaaataaacctcctcagactctaaccttaggccactagatttttgtcatctcttctgccacttgagaatagaatctttttttttgagacggagtctcgctctgtcgcccaggttggagtgtagtggcgcgatctcggctcactgcaagctctgcctcccgggttcacgccattctcctgcctcagcctcctgagtagctgggactacaggcgcccgccaccacgcccgactaattttttgtatttttttttttagtagaggcggggtttcaccgtgttagccaggatggtctcgatctcctgaccgtgtgatccgcccgcctcagcctgccaaagtgctgggattacaggcgtgaggcactgcacccggccgagaatagaatcttttgacccaaatatacatgtgcttttcagctttttcagcccaaggagaagtctagagtatcagagtctgaaatgatattgtgcctggaattttcttaaaaatactccaacaagaaaaaattttaaacaacttaagaaaggggggaaaatgaatggaataaaattggtaaagtgttgataattgttgaagccagtgctatgtgggtgggtggttatcatactgttctacatacttttgaaatttgaaattttccatataaaagtgttttagaatctatgccttgtatttcctacgatattgtgtttccgatgatatttcatgtatatgtcttgcttcagttcccaacttaggagtgccttgaggtggggaaccaaattccccattagttttgttccctcctcaagactgaatccaatactgcaaaaatagccattggtgggtttaattctagagctggccaccatgccagagcccagggactagatgatggattgtggcccagagcagagaaagactccaaaggaaatcattgatagtttcctttctgatctctattttcagatgtgtcttgtgggcactgcagcggagaggtgcaaatatgggtttgggggccatattgatcaatttaatccttgctcctccccttaccagctgtgagaattagatgggaaagtaatgtcaaagagcccagcacattgtagatgctaaatgaatgtgagttcctcaaatctgccatccccagatgctatcaccctgccagcccctccagttccactgggtcttcccaatctcacattggttgcatattggctttcttttttttttttttttttttgagacagtctcgctctgttgcccaggctggagtgcagtggcatgatctcggctcactgcaagctctgcctcccggcttcacgcccttctgctgcctcagtagctgggactacaggtgcctgccactgcgcccggctaatttttttgtatttttagtagagacggggtttcaccatgttagccaggatggtctcgatctcctgacctcatgatctgcttgcctcggcctcccaaagtgctgggattacaggcgtgagccaccgcacctagcccatattggctttcttgctgaaagttcacttaccagggttagatgctgccccaaggaagtgttcattttctggggctttggacaaaggaagggatgtgtgctgagttttggctgtccaatagacttgtgaggtcgcagacttggagctgtggtctttctcaggggaaaaacacacatctgtgatgtcttgattgagccctgaaacacagaagaccaagacaaggttgctcttgaagtgggtgtgttgaggaaaatgaggtggagagaaactttttcattttttcttccttcttttaaagatgtacagaatggaccagagcagttatgtctgtttttatttggggcctccaaacttctatgcaaaaatctcagaaagcttcctgttagcttttcagcacgcccccattgtaaaatgtctcgagttgtttatacaagcagagagagagagtcgaggtcaggaactgcaacagggaatgctcttcggaagctcaagctgaattttcttcaatgatagaaataaccaccctcgagtcaaaatagaacatttaacttttttttggtttgtttgtttttggtttttgagactgagttttgctcttattgcccagggtggagtgcaatggctcggtcttggctcactgcaacctccgtctcctgggttcaagtgattctcctgcctcagcctcccaagtagctgggattacaagtgcatgacacctggctattttttgtatttttagtacagatggggtttcgccatgttggccaggctggtctcgaactcctgactccaggtgatccacccgcctcggcctccaaatgtgctgggattacaagcgtgagccactgcgcccaaccagaacatttaattttttaagagagagtctgctctaagaaaagagaaggttgttggtccggcgtgatggctcatgcctgtaatcccagcactctgggaggctgaggcaggcggatcacaaggtcaggagatggagaccatcctggctaacacggtgaaaccccgtctctattagaaatacaaaaaaaattagccgggcgtggtggtggcaggcacctgtagtcccagctactcaggaggctgaggcaggagaatggcgtgaacccgggaggcggagcttgcagcagtgagccaagatcaggccactgcactccagcctgggcaacagagtgagactctgtctcaaaaaaaaaaaaaaaaaaaaaaagaagaaggttgccacaacctgtaataggacttaacacaactccagtgtaaatagcccattcctatggtgaatgggatgaagttttggaagagcactgcggagcattgcatctgtgtgtacaagccaggccttctgctgctggcagcactcactccagagtggaaggggcccaggaggggatcgtggttttcagcccacgtggtgggtgacctaagcaaagtcattcagatgccctggactttggtctccttatgtaaatattaaggatattaagtcggttgatctccaatctaacttactgtttttgacaccctaggattcactgtgtcttcattctatattatcattcttccatacccctgacacaccaaataaatcaagtgacatatattgtgatctaattgtgtcctaggccatccagctttaaaattcttttggattccactagtctacaaatatgaccacctgtcaggtcgcactggtgacaggaattacacaccttcaagagctaaaactccaaaacgcctccatgtgaccaccccctcccagctttctcccacctctgcttaaatctgagcttccccatgttggaccttccactcctggacccctccaaggctcaattctcttgcctcctgatacagtttggatatttgtcccctccaaatctcatgttgaaatgtgacccccaatgctggaagtgaggtttgatgggaggtttttgggtcatgggggcagattcctcatgaatggcttggtgcccttcccacagtaatgagtgagttctcgctctattaatatagttcgagcaagagctggctgtttaaaagaaactgacacccctccccttctcttgctacttctcttgcctcacgatacgttgatttcccttgcattccaccataagtggaagctttctgaagccctcaccagaaagagatgctggtgccatgcttctggtacagtcttcagaactgtgagccaaataaaactcttttccttagaaatttccttataaattacttagcctcaggtattcctttataccaaggcaaaacagacaccacccttattgtttcttctgcttccctgaactatctggccaaacacttccaagattctccaacaccctaggcctgtgattctcaaagacagatccccagtccagcaacatcagcactagctggaaacttgttagaaatacagaatccctggttgagtgcagtggctcacgcctgtaatcccagcactttgggaggccgaggcaggcggatcacgaggtcaggagtccgagaccagcctggccagcatggtgaaaccccgtctctaccaaaaaatacaaaaaaattaggacatggtggcacgcacctgtagtcccagctacttgggaggctgaggcaggagaattgcttgaacccagcaggtggaggtttcagtgagccaagatcgcaccactgcactccagcctgggtgacagcgagactccatctcaaaaaaaaaagaaaaggaatacagaatcctgggcccacctcagacctgctgagtctgaagttctgggggaggagcttgttttaacaggtcctgctggagatcctgatacaagccacagctggagaactaccaccctagacttatttggcccttaagctatctccagccttggagaaactctactttaaggtttcatttcatggataagcaaggagcatggtagagtgaatgaaaaaaaaaaaaagccctaagttttgacttcttggtctggtttctgtgcagggcagctgaagagaaaaacaaaagcttcccctttacaaccctctcaagctcagtccaatccctaaagcaggaacgacaccagcattaaggggtcaggggcagggaccagccatttctgggcctatgaaatgcagaaatctatgataaatgcttgtgagttaaaagttgtgtacttcctcctgcattgatcattttcaagaaggaagttacactcagtcatttctcctttggtaaacaggatcgggtgtcaggacgaggtgtcagttcaaaaaacctatgctgcattctgtgcaatctctgtctacctatgttgtctacaactgcagttccttacagatttctgaagccttgccttctggtcttcgggggccctctagtctctgcctgtggccttgtttacctgagatattgttctcctctctcagaaacaggactctgatcacattggcagcagtgagcagtaatttggggttgcacatctgcagcagtaagagagtataattcgccttggtccactgggtgctgttcgcaaaccaatacaagatctctttcatcttctgttctactgttttatccaacatttggttcaaggaggacttcacaactttcccctctttcttgctgaggtcgatccgggacctgttatagatgaaatcctttccctgtgtggtctgaaggatattttggaaatagtgtaacaaatataagctatttaactgcttcagaatgccaactagaaacctcctctgtgatatgtcattgatcctgcagaaccactctttggtagagaagatcttccaggctaagacacgcgtctcacacttccggcatagagggatggaatcggttcccttctcacaacgaaaatagggggcattcttgagccttgattccaggttttccatgatcctaagataaccagttcattttagccctgcgcacttgcaacggcaacgccaccaaacactagaggaacggggggaaatgaataaataccccagttgtgccttttctattacaaacgtctcccagagcaaaagtaaatggctgccatggatggaaagcctatctctctcagtaactgccagcagaagtctggctttttgtacagacctccttggaaacatggctttaccgtaaatctcctaaacctggcactgctttatgtggaggcagttgctgtatattctgaaagagctggtcatctcatttctagaacaacaagaatactgttagtcaaatttaagtaatatgtggactattactggtgttgcgctttaattattgttgttatatatggcttctgaatattcatgaatataaaataagatgcaaacttcttatgtttatatctgttcagttacaaagtggctatcccaatgatgctaaatatgtttatattcattttcttaagtcatcatcaaagtaaaaccagaaatgtttaatgtaaatttaagttatttaactgcttcacaatactaaccagaaatctcactgtagtcaaagtgcccaggcaaaacatattgggcagctcacagaaagagtttcaaagtcatgctgagataattctcctacttcaggtaagactcggttcaaacattgactctggtacttaggagctatatggtcttgagcaagcaacctgtcctctctgagcctcagtgtctccatcctagttatgaggatggagaagataaaggtgggtaataaaaatgataactaccttctaggattgcattaaatatatgagatcagttgttgctgctattgttactaagtattattaccctagataaaatcaaaaggtttacaatattgtgtgcctttctaatgcccatgttgaaagatcaggcacaaccagagaaaggtaatggagtccatcgctggggttttgttggcaatggcagtcacatactagggtcagaatggggaataggaatcaggttaagaatgagatcagttctcacagctcaacctcttctgtctgaagaggaatctggagaaaaggcatgagtagattaatatttaattaatcgggaaggccagacaaaggagggtggcaaagagaagggaggcccgaagcagactctttggatctgtaaggcgggcacattaccctaagaagtgctgcaagttaaaagtagctcttttttttttttcgtaattaacttgtttatttataattgacagattataaatagcttgtttttaaagatttaaataaattaggattttatctatgaggctgacattcttcaaggaagcatttttttttttttttttttttttttggaggcagagtcttgctctatcccccaggctggagggcagtggtggcatctcggctcactgcaacctctgcttcccgggttaaagtgattctcctgcctcagcctcccgagtagctgggattacaggcatgggccaccatgcccagctgagttttatatttttagtagagacgaggttttgccatgttggccaggctggtcttaaactcctgacctcaagtgatccgcccgcctcagcctcccaaagtgctgggattacagcgtgagccaccaccccaggccaaggaagcagttttaatcacccaactcagtctttatttcacatttcagggctacaaacttgggagtcagagagagagactaggtttcagacatgagtcgtatcccctctccctcaacactgcacacacacggttctcctcaaacacctgtggaccatagtatgttgttgcccctcggcacctccttttctaaacagcttctttgagaagatgacaatgggctgcctcctgagaatagagggacaaggggtgctccagagcaagtgagtgcgagagggcagcgcctcactcccttcctccctgcctcctgctggcctgcacctttcagaggttgggccatacacccgactttggggggaagttgaagccatttgggatctgatgttacagttaaaaatgtggccttaggccaggcgcagtggctcatgcctgtaatcccagcactttgggaggctgaggcaggcggatcacgaggtcaggagatcgagaccatcctggctaacacggtgaaaccccgtctctactaaaaaaaaaatacaaaaaattagccgggtgtggtggcgggcgcctgtagttccagctactcgggaggctgaggcaggagaattgcgtgaacccaggaggcggagcttgcaatgagcggagatgtgccactgcactccagcctgggcgagagagcgagactgtctcaaaaaaaaaaaaaaatgtggccttggcacagggcaggatagatgggccagatgggataggccaatgcagggacatggcgccagtggtactcaaacaggcaggtgggcaaataggcctcatcagaccgactcacaggagtccagtgggggagagcacttctccgaggaaggctataggatgcgaaggacatctgcgacctctcaagtattcaggctacgagcagcctggaggcttcgtgccagtcccctatctttcctttccgccctgttttattcatgatcccgataaaacctcctcagcacacaaccctaaatctgcacttgcttttcctgccttcccacatagtatggagaagcttggaaggtgcggccgctgctgggccagatagaggacaatgtgtcacacccatccggctctgatgtcacacttgacactgcaccagaggacctgagcctctgctggctccagcccagcccctttgccttcccctactgccacctggcctggccagccagcagggactcgggaaagcacacaggtttcagagtaggagggcaaggaatgaactgggctctgccacggagcagcttcatatgcctgaataattcacttgctagtctcagcctgctcctcttccatgaagtagagaccacggtcctacctagctcataggtggctgtcggggtcaaatgagtagacttttacaccatgtgaggagctaacaagtattattagtatcattagggagtgtggaaaaagtgtgatatctcatctctcgccttcccatcatgtggtattacactggttggaagttgaattttaaaaagcttggccgggcgcggtggttcacgcttgtaatcccagcactttgggaggccgaggtgggcggctcatgaggtcaggagatcgagaccatcctggctaacatggtgaaaccccgtctctactaaaaaatacaaaaaattagctgggcgtggtggtgggtgcctgtagtcccagctactcgggaggctgaggcaggagaatggcgagaacccgggaggcggagcttgcagtgagccgagacagcgccactgcactccagcctaggcgacagagtgagactccatctcaaaaaaaaaagaaaaaaaaatttaaaaagcttttgttcatgagaaaccagagcatgcacatatatacacactttctttcaggtgatcatcagggtcactacttaagttattaatgtgggggaaaggtttttcacctaaaatgactgaccactgctatattgacccttggtccttatgaaatgatctgttctccctccttttccagtacttggactacttccttctgggagacagtgggattttcccaacaagactacagagcaagccagaaatagagattaaaaactaggcacattccagcaaggcagggatggccaacactctacccgagccatgcacagtctgtgccctgcatggacatattgggggcatatcaacagcaggttgccctgcaagggcctcctccccagctgccaagatgtctaatcacaggtgcagagggagggagtcggtgctgaaatctgaggaagccaggagaagcaggaaatacatgcactaccttttcttccatctttcatctggggctggagtggtggcccctggaatggaggcagtggctgcagagatggggggaaaccagggagtaggtcactcaaggacacaagacagaagccagtccctaaagatggcctgcgaaaacgcagcagcaccctaggacacagagtgagaaacctgttttatacatcaccttgtctattattctcttgaagagcagattcctatttagctcttcacatatgaacagttttacttcagtttaaatccccttcttgtgatcaaatgacacagctagttagtttctgggttactctttcttagcgtctagcacagcagcttgcacattataagtgccacgtatatttagactacttaatttagggacatcattccaaaaacatgctgagccagactgaggggataagagctctgtgattgggccaatcccgttatgtcatcatttcatcatgcctcttgggagaaagtgggaatttacttataattcataagatactcagaaaggaatgctatatacactcagatttcaaaaagttgagacaagaataaattatggacatggtggttaaaattacattctgactctgcaattacaaatggtctggtaatggagcagaaccatgtggcaccaaagtgagctcttggtgaattcagatttttgttcagtgttttttttgttttttttttttgtaagtctacataatggaagaaaagataaggatgggtgaatacaaaagagtggcatacacacagctaaggaaaatgccagagaatataaaataaacccttgttctatttttttttctatttgttttagtcatttttcagtttttagaccaagaaaaagaaaaaagatgtgcccactgcttgaggcagtgacagaaggcaaatatgcccaactctttttttttttgagacggagtcttgctctgtcacccaggctggagtgcagtcgtgcagtctcggctcactgcaacctctgcctctgggttcatgcaattctcctgcctcagcctcctgagtagctgggattacaggcacacaccaccatgcccagctaatttttttctattttcagtagagatggagtttcaccatgttggtcaggctgctctcgaactcctgacctgatgatccgcccgccttggcctcccaaagtgctgggattacaggcatggcctcccaaagtgctgggattacaggcatgagccaccgcgcccggcccaaatatgcccaactcttaattctgctttgctctttcatatcaagaagaaaggtcttgaacttgaaagctaatagacaaaaagttaacaggaaaatgaagttcaagacaagtaaagagacacctaaatggttccttttatataagctcaagtattctggtctaagtaaattacatttcaggaatctgacacaacttaatgacatgactgcaaatcaggtgggaatctttgagaaactagggagaatgagagaggacggtgtcttagtcccattgtgttgctataaaggaatacctgaagctgggtaatttatgaagaaaagaaattgatttgtctcatggttatgcaggctatacaagaagcatggtgtcgtcatggccattcatgagggatccaacccattatccaaacacctcccacccagctccacctccaacatgggagatcaaatttctgcataagatttggaggggacaaatatccaaattgtatcgaatgcagacaggcatctcgatttttttaaaaataaaaataagatagattctggaaacaacagactggtaaacatggtattaacccacagcagaaatctaaagtggtttatcaaatattttgtgaacatttagaaaagaaaatgaccatgaccaagcaccaacaacccgcagggattcaataaaataaggcagtccaagctgatctcaatttgtcttgagctcattattagacagatagatcaaagaagttcagacatagcatatcttttttttttttttttcttgctctgtcgccccggctggagtgcagtggcacgatctcagctcacttcaacctccacctcctgggttcaagcaattttccagcctcagccttctgagtagctgggatcgcaggcacgtgtcaccatggccggctaatttttgtatttttagtagagtcagggtttcaccatgttggccaggctggtgtcgaacttctgacttcaggtaatcctcctgcctcagcgtcccaaagtgctgggattacaggcatgagcccccacacccagcctaaacatagtatatcttgatttctgccactgaaaatgtctttcatcatgttcagtggataaaggtgaaaaaggtggggctacattattgcacagttccacccgtgcataatttgcatgtaattaaacctagaagctactgactgagtgccacaagattctagatttggtcctaatctcctcgatatatttatcaacaaggataagacttaagaagaaagggttatggccgggcggggtggctcacgcctgtaatcccagcactttgggaggccgagacaggcagatcacaaggtcaggagattgagaccatcctggttaacacggtgaaaccccgcctctactaaaaatacaaaaaattagccgggcgtggtggtgggcgcctgtagtcccagctactcgggaagctgaggcaggagaatggtgtgaacccaggaggcggagcttgcagtgagccgagatcgtgccattgcactccagcctgggggacaaagcgagactccgtctcaaaaaaaagaagggttaccaattgtgcaggtgacactaagctaggaaggagagccaatatactggataaggaatcatgaatctcaagtatctcagcataaagcaatgatgtgatgaaattaaagtaaaatcattttaaatcctatactgtaaacatccttagatacaaatataggtaacaagtcaagttatgctaaagtaatatactcttgagacaggccaatcagactgattggagaaaaaaagatttgccttgacaaaggtcacaggaacagactcaaaatttatatttctggtgaatcccaccagaaacttcaggttatagcttcagaaacccatttaaagacagtttgccatttgcctaaagacttgatgaatgctgatgattaatcttaggaagcttatctgtcaaaagaagaatgaaataatcagggggaaaggactgagaaccataaaggaaggtggaaaatttcatatgaaaacaagaacacctggggcgtgggtattacgtgacagttcttaaaagaaccattctttgaatgagaaatcagacaagtccacatattccaggttactttagaggagaggagtagggcccctttccagaggtcacagggactaaaactcagacactgttaagacatttcttctaatccttgctgtccccaaatagaaaggactgctgtgtgaggcagtgaggcagtgagctagtgcaaggcaggatggctgagtcagatgttgtgtgtggatttgcaaacttcaagaagtttctctgctatgcattttattgccttttatacaatgtccatgatctaataaggaaggtggccgggtgcggtggctcacgcctgtaatcccaggactttgggaggccgaggcgggtggatcacgaggtcaggagatcgagatcattctggctaacacagtgaaaccccgtctctactaaaaatacaaaaaattagccaggcttggtgacgggtgcctgtagtcccagctactcgggaggctgaggcaggagaatggtgtgaacctgggaggcggagcttgcagtgagccgagattgtgccactgcactccagcctgcgcaacagagcgagactccgtctcaaaaaaaaaaaaaataaaataaaataaaataaaggaaggcaatatgatgtggtggttaaaagtccagtgtcggccgggggcggtggctcacgcctgtaatcccagcactttgggaggccgaggcgggcggatcacgaggtcaggagatcgagaccatcctggctaacacggtgaaaccccgtctctactaaaaatacaaaaaattagccgggcgtggtagcgggcgcctgtagtcccagctactcgggaggctgaggcaggagaatggtgtgaacctgggaggcggagcttgcagtgagccgagatcgcgccactgcactccagcctgggcgacagagcgagactccgtctcaaaaaaaaaaaaaaaaaaaaaaagtccagtgtcattctacccacacttgaatcccagctctgcccctcactcaccatgtgaccagagtgaccttgaacaaattagctaactgccccggaccgcagtttctccatctgcaaaataaggatgatataagcatctacccaatgggtgttctgtgaggactgagttaatgtgcaggaagcataagaacggtatctggcacataggaaatacgcaagttagcaatttattatgataactctgcaatcttttcagccactctttaaggttcctggtcatccattctgggcacagtgtgacatttacctgaacagagaggagaatggcactagaagatgagggagatttggtgcctaaaaattactacaaacaggcagggcgcagtggctcacgcatgtaatcccagcactttgggaggccgaggtgggtgcatcacgaggtcaggagtttgagatctgcctggccaacatggtgaaaccccatctctactaaaaatacaaaacattagctgggtgtggtggcaggcacctgtaatcccagctactcgggaggctgaggcaggagaattgcttgaactcgggaggcggagcttgcagtgagccaagatcgcgccactgctctccagcctgggcaacagtgcgagactccgtctcaaaaaaaaaaaaaagaattactgcaaacacatagagaacagcaccatatggagcaaaagagagcagctggagaatgttttcattcagagaccccataggatttcaaaagccagctaccatcagcagttatttctgcccccaaatcaccctaaaatgcaaatcccatcactgtagctggcaaaggtctgggatatggctcctggagtctagggagcagtccccaccaaggacggtgctggcttctcgggttcctctcccagatctacaatccggatggcgttttccttcttggaaagccagaaggcagcatagactggttctgaaaatttgcaggcaaacttgtgaaccagagtcatggtatcatactctacgccatagaaggaaaggatccctcccgggaagtcgatatagaccccgagcctccggaaagggccagctttgagtggggtctccatgtcactgtaccaggccgtgaactccttcccgttccattggaggctccaggagaagttgtttccggaaatgcaactgttgcgctcctcccctttccggtcgatgcctttgcaggtcaggccaacataggtgcctgccccgaagatctccacctcaaaatagtacctgtgcaggtacagactctgctgggacagcacctgccgccagtgcaggaacctgctggggaggtccgggtagggatgctcccagggcgtggtgttggtgaccttgcggttctcctcctgcagccggagatacttgtgtgctgtgtccgggtcaaacgtgatgtcatacgcatctgaggagacacagaaggcaggagagtggttcaggaactgacagctgattcagacagaatgctttaaacccagctgggctccaaagcacatatgagaaaacatccatttctctgttctctatttacccaggctgctgtttccctaggaaatgaggtgagtgaagaccagaaaacagagagcacaaatcatctactcccttcccttatgaagctcaagttgcttgacattgatgatattatttgatgaaccgaatcaagaaatatattaatttactcattcatgcattcattcattcattcaacaaacatgtattgaatgcctggcattatcctacccagtgttggcaagtgtttggggaagcaggtactcctatacccatatttgatccattcattcattttttaaaatatttgaccaacatcttaaaaatgaatgaatggatcaaatggagcatgaagaactctcaaacacgccctcatattctcctcccactcccaaagaataatagggtctcatgcaccccattgctcaagtcaagctctatgtcatttctgacatttgttttgccctcatcctcttcccctatcctcactacacacacaggaagcagtaactcctacggattctaccacttctctccagccccctgctttacccccgacctaagccaccactcatctcactcagactagttcagcgggtttctgactggtcgttcgctgttctctcttgcccccttcaagaccttctccacaacagagccatgctgcttgtttccagctgtaggctgaggccagtcgtgttattctagcttaaaaccctttcatggtgtcccttgctcttatgataaagcagcaaccccttgccctggcctaccaggccccacgtccctggtcctttcctgtgtctctgactctctcccttgattactacatttccaccgtgctgacctcagacctactcaacactcaatcctctttgagcctttggtacagcctgttccctccgagatgtgatcacgccctactctgagtctggtgaatcctaccgatccattcaggctacaactgagagttcatgtcctcgaagaggccctttgtgactctaactcactctctcccagagcaccatggtgttttaaacttggcacccctctccatttgtaataatatatattcatgtgagtgtttgtttcctgcttgtcctccctctaatctatcagcttcacattttgcatgggattcttctctaactcagagaagatgctcagtatatacttgccaaatgaattagcatattaaaggctattaaaacaatcccataattaaaaaagttctcactggtgcagaggcttatgccaacactttgggaagctgagatgggagaatcacttgaggccaatagtttgagaccagcctgggcaacacagcaaggctccatctctacaattgtttaaaaattttttttttaattagccagatgtggtggcatgcgcctgtggtcccagctactcaggagactgagggaggaggactgcttgagtgtgggaggtcaagcctgcagtgagccatgatcaagccactgtaccccagtctgggcaacagagaccctgtctcaaaaaatatacatacatacatatatatatgtctacatgtatatatatgtaaacatacaaaatatgtgtttagtgactgtttatgtcaattaacagaaggctattactagttaagttcttgaggaatcaaaagctacacgtggatgttcaacaatacgagggattggtatcccaacccctacattgttcaagggtcaactgtgcagtgttttaaaaatgctaatggaccaagtcaataacacttaatgataggtcaatgagttatgcaattctggccaagtcatacatagaaatgaatcacttggtaactagccaggactcttcaaagtgctatggtcatgaaacacaaggattgaaagactgatccagactgaaggagactaagaagacatggaaacatctgtgaccttggattggactttgggccagaaaaaaagggcattgatgaaagacttggtgaaagctgaataaattctgtagattagttgatagcattgtagcaatgttattccctggttttcatcaatgtattgtagttatgtaatgtgttaacattaggagaaactgagtgaaagatatatgggaattctttgtcttagttctgtaatatttttgtaagtttcatattatttcaaaatgaaaagttaaaaaaattgtttaaattaaattttaagaaatgtatcatttagagatagatatgaagttgcaagaacctgaaacctagatgagagatggcggttctgacttagcaaagcactgcactgatatcaacaactggagaagcgggtgccgttcacaacttacattggaggaactgttccctggtgctgggctcaggtttggaagtccaatatttgcgctgaacaacggcagacacttgagttctgatgtcatactcctctagaaaatcaagagagttgtgaatgcacacctgtccaggtggtcaggagaatctgcaaatcaggacttcccagccacccttccctgggcttcctggggaaagaaggggctgaagcctggtaatgtttcacagaaatacgctcaatagactacatttctttcataggtaaggcataaaccactgaaaaagtgatccagaccatcttggatttaacttaaaagtataggcatcagcaacctgggaagctagtcacagaaatgccagccgatcgcataatataagcatgactaattgtccttctttgggtctcaattgtaaaagaaaatcatcgagatgagagtccattagtaacataccctgtctgaagcatggctttgaaaatgagacatttgactgggcacggtggctcacacctgtaatcccagcactttgggaggctgaggtgggcagatcatttgaggtcaggagttcgagaccagcctgaccaacatggtgaaaccccgtctctactaaaaatacaaaaattagccaggtgcctgtaatctcagctactagggaggctgaggaagaagaatctcttgaacccgggaggcagaggttgcagtgagctgagattgcgccattgcactccagcctgggtgacagagcaagactgtctcacagaaaaagaaaaaaaaaagaaaatgaaacattcccctgatttcatcctcccttccctgactctctctcaccttcctatcatctactgctagagacacactcactatagtccatggcccagaatgcgtctcaccttccttggaaaactcctggagctttttcttatagttctccagcaactggattaagtgtacagtggattccgtgataactttgcggatgcccgagagtttatccttcagccctacgtaaacactagggaaggtgatgtcttcagtgttcttaaacttgcagtactcctgcagaaaaggaaacagcagaacttgctgtggtttctgtatttctaaactcgggcttctctcctcattaagtcactttttgcatctgtaaaatgggctgacggtaatgtgtccttcacaaagaaagtacatgtgaagtgtcaagctcagggtctaacaaaatagaaagcacttctctagctgctagaccctcagaataagtgggattttaaaaaaaacaagtgagaacatgggattttaaaaatcaagatgtactagatggccatgaacagctccaatacacagtccagactggggaccaaaaaataaagaacattcttgctttgttcattccgtcagtacttgttttttgacaatttaaacacaagccatggtagaaaatggaggagctctcaggcaggagtgctgcctcttccttgtcagtttcatccaatgcataaatttctgtaattcttgtaccttgctttagtatttggaaagtgttttcacactgataatcacatagtttcatgtaagttttgaaataacgtgtgatcaggaaagatgctttcagatataacacagtatcaaacttcagctgcaactgaagcattaaaaagcagaccaggtacagcagaaaacatagcaatgaaaacagttgtatgaaaatgattagatagagccatggaaatcaaaaccagagaattgatagagaaaagggtaattcaacattttaatgctatatactgtacatgacaaaagtagcattttaaatcagtgggagaaaggataagttattcggataagttattcaataaatcttgttttgaatgcctaaccaaaaatttgggggaaaacgttatcttttgccaaaataaataaatatctttttttttttttttttgagacatagtcttgctttgtcacccaggctggagtgcaatggcgcaatctcggctcactgcaacctcttgcctgctaggttcaagcgattctcctgcctcagcctcccaagtggctgggactacaggtgtgcaccaccatgcctggctaattttttttatttttagtagagacagggtttcaccatgttggtcaggctggtctcaaactcctgacctcatgatctgccggccatggcctcccaaagtgctgggattacaggtgtgagccaccgtgcccggccaataaataagttatcatacactagaatttattttatatgtgttaaagtcttttatgttaaaaataaacttacaggctgggtgcagtggctcatgcctgcaatcccagcactttggggggccgaggtgggtggatcacgaggtcaggagttcgagaccagcctggccaagatggtgaaaccccatctctactaaaaataaaaaaaatttggccaggcacggtggctcatgcctgtaatcccagcactttgtggggccgaggcgggtggatcacgaggtcaggagatcgagaccattctggctaacacggtgaaaccccatctctactaaaaatacaaaaaattagccgggcgcggtggcgggcgcctgtagtcccagctacttggaaggctgaggcaggagaatggcgtgaacccaggaggtggagctttcagtgagccaagatcgtgccattgcactctggcctgggcgaaaagagcaagactccgtctcgaaaaaacaaaaaaaattggccgggcgcggtggctcactcctgtaatcgcaacactttgggaggccgaggcgggcagatcacctaaggttgggagttcaagaccagcctgaccaacacggagaaaccccgtctctactaaaaatacaaaaaattagccgggcatggtggcccatgcttgtaatcccagctactcaggaggctgaggcaggagaatcgcttgaacccgggaggtggagcttgcagtgagcagagatcgtgccattgcactccagcctgggcaacaagagtgaaactcagtctcaaaaaaaaaaaaaaacaaataaaaataaaaattagccaggtgtggtggcgggtgcctgtaatcccagctactcgggaggctgaggcagagaattgcttgaatccgggaggcggaggttgcagtgagccgagatcgtgccactgcactccagcctgggtgacagagcaagactccatctcaaaaaacaacacacacacacaaaaataaataaagttacaaaacgagaaaagagaaataatttatatactctttgggtagatcttaagggaaacttgtgaggcgggaagccaaatggttattaaatggttattcatattttcttcgtgttttgatactgaaaagcaaagaaactgacagacgctttgttggtgtttttgtctgtctttctcttttactcattcaaaagttaactatgttgtacttgtgtaaggattatggattttttttcttctttttttgtactttccaagtttttcacaataaacatttgttttttgtaactagcagagaattttttcaaaaatgcaagcaagaaaaaattgtatttcagaatatcagagcttggatggagccttctgaattatttactccagtgggcttgttgataaatgagaaatttgagactcagggatgtgaagagctgttaacagagctgttttctgacagattcaggatgttgcagtttacccccaacctagtgttccttcctcgaaaggttacatgttctttagatctcgttccaatggcttacggtttgatgtctaatgatacattgtaatgaaaagcatttcctggttccaactgcttacctttaatgtctaatgatacattgtaatgaaaagcatttgctcttctgagccctcctcaattactccagccacagccctctctgaaaagcagcaggctccagtctcatccctaccaagcaaacctccatgcagtggactgctggagcggtttataaaacatactcactgactccatcattctcccatctgaaacccttcccagccatacacctgcctggccgtgccagtctcatcactctgcacccagtaccccaggctccacccctattaaagtaccttggctccccaaatcagctgtgcttcctcaaacctctctgcctttgcatatgttgttccctctacctggaacatactgcacgttgaacctgactcatcttccgggacctgcttcaagcttccctgctctgagcagttctccctccctacccctcctatactctgctgaatgaagaatctgcttctctctgttcccactgctccctgtgcacaccatttaacaaaaaacagttccattcacagatggccatgggcctagcaaagagagggtgcttcatggggcagctgtgggatgcctctgcccccgcaacccccatacctccaagaactggacagtgttgctgatggccgccatcctctccagctcctgcttgctcttctccatctcggcactcctgtactccaggtgggccttgataccgttggcctggctcagcgcagcttgctccttctcctctaagaagagcatcacattggcctgggccttcctcacagcagcaaggagttccccaaactgcatttcagccaccgctttgacctctgacaccgacacctggcagggggtgggggtggaaggcagccaaacatttcttagtgaggcatccaacttgatagaaactcaacatacagaaatgtcagcttgagaaacacatatattagggagcagttccctattgtaaaaggaatcctttattctcatgtgaattccaggttcctggaaaaaggatttacgtattaacttggtctcctcatccatttgatgagagagtgaattcctctatgacctctgagatccctcacaactctgacactccgggattgttagtcaagtttccgaaattgattttcctaccagagcaatgtgtgtattcagtctacttgatagtcatatttcaagaggtaaagaatttggctttttttttttttttttgtataatcagcatgaattagctttcttagcatttcattatgcccggttaaactgaccactgagtccatcagagccaaatgcatgtctaagatgatactgtctctaccacatacagaatccccataaaatgtttagggtgcagacgaccatggcacccaagcaattccaggacaagcatgtatatgcagaacagaatgtgacattcaaataaaatataaaagaaaacccatgtgagaaacattaagggtttgaatgatggggcacatgcatgtggactcttttgcatggtaagcatcctctatgaatgccttcaatcaatatcatgtttacaacatctttccaagttctgaaggtttcctcttctctggtattcttaagaattggtaggagcctctccgcccggtagccaccccatctgggaagtgaggagcgtctccgcccggcagccaccccgtccgggagggaggtggggggggggggtcagccccccgcccggccagccgccccatccgggagggaggtgggggggtcagccccccgcctggccagccgtgccgtccgggagggaggtgggggggtcagccccccgcccggccagccgccccgtccgggaggtgaggggcgcctctgcccggccgcccctactgggaagtgaggagcccctcagcccggccagccaccccgtccgggagggagatgggggggtcagcccccctacccggccagccgccccgtccgggagggaggtgggggggtcagccctccgcccggccagccgccccatctgggaggtgaggggcgcctctgcccggccgcccctactgggaagtgaggagcccctctgcccggccagccgccccgtccgggagggaggtgggggggtcagccccccgcccggccagccgccccgtccgggagggaggtgggggggtcagccccccgcccggccagccgccccgtccgggagggaggtgggggggggtcagcccccccgcccggccagccgccccgtccgggaggtgaggggcgcctctgcccggccgcccctactgggaagtgaggagcccctctgcccggccaccaccccgtctgggaggtgtgcccaacagctcattgagaacgggccaggatgacaatggcggctttgtggaatagaaaggcgggaaaggtggggaaaagattgagaaatcggatggttgccgtgtctgtgtagaaagaagtagacatgggagacttttcattttgttctgcactaagaaaaattcctctgctttgggatcctgttgatctgtgaccttacccccaaccctgtgctctctgaaacatgtgctgtgtccactcagagttaaatggattaagggcggtgcaagatgtgctttgttaaacagatgcttgaaggcagcatgctcgttaagagtcatcaccactccctaatctcaagtaatcagggacacaaacactgcggaaggccgcagggtcctctgcctaggaaaaccagagacctttgttcacttgtttatctgctgaccttccctccactattgtcccatgaccctgccaaatccccctctgtgagaaacacccaagaattatcaataaaaaaataaatttaaaaaaaaaaaaaaaaaagaattggtgtagacagccgggtgcggtggctcatgcctgtaatctcagcactttgggaggctgaggtgggcagatcatgaggtcaggagatcgagaccatcctggctaacatggtgaaaccctgtctctactaaaaatacaaaaattagccgggtgtggtggcgggcgcctgtagtcccagctactcagaggctgaggcgggagaatggcatgaacctaggaagcggagcttgcagtgagctgagattgcgccactgcactccagccctatcccatctgagactttctgagcacccctccaggtgctgttttctctcactcctcccaatgttaagggccagctctgaacatcagggctccaaagtgagtcaaatagcagatatccttgggcagaggcttcaggggcacctcccatccctggcaaggaaggagagagggagagagggagggagaatgagacccagatcaaaaaggggagcacagtaaggaaaggactcagaaaggatgggattctgggcccaggcttagtgggaacctagaggtttggagggagatgggaagaaaaaatgatgacaccagataggtcttctgcctggctcaggccctggcttaggccagggctcagcaattcactccacgagaatggtctctgatcagtcttcaatctggtggcaaagggaagaataagcaggggaaagaaagcaaggggtatccctactggagggggatggtgggaagacacagacaatctccctacattctctctctctttttttttttttttttttttttttttagacaaggtctcctctgttgccaggttggagtggcacagtcttggctcactgcagctttgacatcccaggctcaaacgatcttccacctcagcctccgaagtagcagaaaccacaggtgcatgccttcatgcccaactaatttttatattttttgtagagataggagcttactacgttgcccaggctggtctcaaactcctggcctcaagcaatctgccgtccttggcctcccaaagtgctgggattacaggtgttattacaggtgggattacgtccagcctacattctcatttttatgccaacttttccgttgcctgttggcttccttgaggttaggtagctggacagagctgggagcaaagaagctgtggtaacaggattaaggaagagcggggatggtagactttatccaaattcttccagcccacaccaagaaaagcttttagacaggtgacggtgttgagaagccagggcagcaggagaggcgatttgggaaacctgaggctatctggttttgtggctccctccggagccctgttgtccagagctggccctcacccttgggaggaggaatagtagcaccttaaccagctgctcagaaagactgcaggtggggacaatagtagagaaggaggcaggcagagaatgggctctggactgtggatgggaggctcagagcactgtctgaaatgaagacctgagaaccaggaaagctacctgggccccacccaggccccccaagtggcaaacctgctgcctggggctctgccaggtataggctctgcagccctctgacacttcacctctctccctcttcccactctcctgagaatgaggaccctctgctgctagcctggtcactcttccaattatataacaataatcataaaaacaaccaacatgtagtaagttcttactatgtgccaggcacttttctcctagcaaccctaaaaggtaggtactattagggtctccatttcttagataaggaaactaagacagtgataaatggactgatttgcccaagatcacacagccaaggtttgaaccaagactgtctgtctctggagtccatccctttgaccaccattccacactgcctcaaaatagggcccagggttggggatccatgtgcctgcagtatagcactgagctggcacagcctgacctctccctctgggccctggcacattcactaggatgagctggggaggtacaatgggagttcagctgagctttcagcccatgggctgtggctgtgtgggggttgcagggaaggacctttaagttcagcccattaaacagaagccctcccaagaccagatgagagacagggcttagccccttgttcactgtgggcaccagttagggtaacatcctatgcccataatggactataaatacacaggctgctgctgagcaggcgaccaagagggaaagaggccaagactcccagcaattcctgaaccaactgtttacaggtgttgcctccttgacattgcaaacactgtaaattctgatatattaatcattactagatttaaatctaaaagccaaattacatttccatatggcaaagaagtaatgatgaagaaatctacctcagaagacaggagagttttgcttataaccatttgggagcgggggcaaatggtggtgatggtgtttgatccaggctctgcattagctaacgtgtcctagttccccggcttactcacccttcatgcccactcaggctccaggtagccaggctctaggagtcacagaggccacagagtgctccctgcctgtactgcccgctcccgatgacctccagaaagcaggagcaggacacagcatgggaaccagcatgagggtgttgtgggaaaggagcagaatcctgtctacaattatgacctgtaagttcctcatagaagcacgataccatgaggctaagaggatgagactaaagacaaactcaggatccaaatcctcacccccggccccaactgaggccatcctgagaaaggatagtggaagggaggtgtcagatgatattggtggattgaggttgacttctgctgtggcctggccctcattcctaaaccctcccattgagaaacacttctttcttgcatgtaaatgtaatgtgcaaagggcattacttaccatgaaaatgatgacaagcagaaacagtacagagaggagaggcctcaatacattcaaggagccagcaggtaatggtttaaagatttgaggatggtgtacatgcctatcaatatactgagtcattcttaagtcaagggagcaacaactctaggttctcacattccatcaatctagatggccctagacaagtattgtcatctctccatgtcttcatgccccttgtgcatggtagctattgtaataactacctcccctggtcatcatgtacttatgagaactgaggagggatcaaagtgtctgaaaattaaagagctgggaaacacaagaccctccatgtggttctacaggttatcttgagcctggaaatccattatctctgaaggtttataaggctttaaagggataattctctttcttcctttaataagatattgtgggtaagaaagaggtgtttcatccttcagtagctagttggttgtaaacacccaggaggtgaaaattaagttgaaatgaatacatgcattaggggtagatgaatggatggatggatgatggatggaatcatttattctcaggatataaagatgacaatgctgattcacttccatagggtaggtgttttgcattctctctttttttgaaacagagtcttactctgttacccaggctggagtacaatggtgcaaactcagctcactgcagcctccacctcctgagttcaagcaattctcctgcctcagcctcctgagtaactgggactacaggtgtgcaccaccatgcctggctaatttttgtattttttagtagagtcagggtttcaccgtgttggccagactggtctcgaactcctgacctcaagtgatccacccacttcagcctctcaaagtgttgggattacaggtgtgagccactgtgcccggcctgttttgcattctcttctgagtggtggttactggcttgccactgatgagaggcatttgtagaactcctcagaatccacttggagaccatttactgcctacttagcctggcacaccatggccttctcaaataccatcagtaatcctgagttctcaactccttttttccagctgccaggtcataggactggtgagactcacatgcagaacaccctcatataatggaagaagccaagataacgtatagtttttggacctctgactaaactcccagccccccacacacatacaccctgtcaagacagcataagcaaatgtagaaataagaatgttgttattacaggattagtcttggttctaatttatattattaaaaagcaaatcacttgccaggtttaaaacttaaactaatttcataacaaatcctgacatcaaggtgaggctaccgcatggtgtagtcaactgtacctacaattctcatttgtggagaaaccccaaggaacctacaggaatggaggctaggcatgcagtaccacgtcccacaccctcacaggcctggctgacccaggctggtcttaccagaacagacttttggttagcctggagcctggagatggcattttcattcaacttgagtttccgctccaagtctaactgggtgcactggagttcagcctaaaagtggaaagcagagaattaaggaggaaggagcccaatgcacacagaaggacacgggcactctccagccctgacatccccgcccttcttccctggaaagaagtttaacttctgtggctgatctcagaaaccagccgggaggcacgaagggttggcggtgagcccgtgccctcctggggctgcagtcagcatgagtcagcgaaaatacagtgagcacggatgccgtgctgctcaccatttcaagcattttgtggattaccccacaccatccttgccatacccatactagctgtaaaccagaaataaaatcctaaacccccaacaatctgaatggatccctcctctcagcaaagggcattccaaagttaacctgaaaaaccagttcaggccatgatgggaagggaggtcagacatggctcattataacttcctcccttttggaattactgatacagcagactctttcagtctgattagaaacatttacaatctgttctctccaaaacctcctccctggaggctttacccacatgataaaaccttggtttccaccacctcttatcttaacccagacattcctaagtctttagacaataacttgactctttcaaccaactgccaatcagaaaatctttgaatctacctatgacccggaagccctggtttccagttgtcccacctttccagaccaaaccaaattacatcttacatgtatttgattgatgtctcatgtctccctaaaatgtatactaggctgtaccccaaccaccttgggcacatgttctcagggtctcctgagagctgtgtcacagaccattggtcactcatatttggctcaggatgaatatcttcaaatatgttacagagtttgactccttttgtcaacataggtaaacatgattattatttcaaaggtacaggtgataaaatcatgtttccaagttcatcaatggagttgagcctaggctgaccccacaagagccaaacagggagtgtagggttggagccagatggccaagtgggaagtctacatttttttacttagcagttgagactttggccaaatttacttatgaataggaaaaacaaactttctttgtcttatagtcacacaacacagaacactttcataactaaaacgtgtgggtttttttccacatgaagccattctccaacaacagctgggtgtcctaagatgtaactcaattctgacactccctacttggagatggaagagatgcacggggcaagggatgtgggagggaagtgacacctccgtgccctctccagtgcagggtgcacaccctccatggacttccaccccttcagcaatccagaagctcccggaagcccagccctttgggtttgtgtctttgtttattttgagatggagtctcgctctgtctcccaggctggagtgcagtggcgcgatctcgactcactgcaacctctgtctcctgggttcaagcaattctcctgcttcagcctcccgaggagctgggactacaggtatgtgccaccacacctggctaatttttttgtatttttagtagagacagggtttcaccatgttggtcaggctggtcttgaactcctgacctcaaatgatctgcctccacctcggcctcccaaaatgctgggattataggtgtgaaccaccgcgcctgatgccttttgggtttatatggaggcttcatgatgtaggcatgattgattacatcactggccattggtgatcctctcaaccttcagcctcacttccctccctggaggagatcagggagatggggctgaaagtcaaaccctttcatcatagggttggctcctttggcaactagcccccatcctgaggctctcgggagccccctcagccacccagtcatctcactggcattcagacacttaccacttcagagagtctgggggttctaagagctgtcgggtgccaggaaatgggggcagagaccaaacctaagtttttgttgttgttgttgttgttctttgtttgttttttgagatggagtctcacactgtcgtccaggctggagtgcaatggtgcaatcttggctcactacaacctccacctcccgggttcatgcgattctcctgcctcagcctcctgagtagctgggattacagatacacaccgccacacccggttaatttttgtatttttagtagagacagggtttcactatgttggccagactggtctggaactcctgaccttgtgatccgcctgccttggcctcccaaactgttgggattacaggcatgagccaccgtgcctggcctgtttcttatttcacaacttaatatctctaaacttccatttcttcacctgtgagatggggctcagtaaagtgtttgcttcataggattaggaaagaatggactaacgagataacgtatgtcaataagaactttgtatagtaccagggacattattaatgagctccataaatgtcagtgggtgccagcatcgtcatcatcatcattattactcctgctaccatggctgctttccattcatgttctgtattcgaaggcagagccagccctcccagcccaggcaagtgcctgcccaaaaacctcaggtttgcctgctttggccccagcttcaatcttgcctcctgggatgcactaaacaccttctgccaagaggtgtgccaaggcgcacttaagcctttgcaaacctcaaagaccctgtcactttcctacttccacaagggcaatatacaaaaagaaaaagaaaaaaaaaaaagaatcgctttcactgcttaatagcttctgtctgcatttaaagctgcgagtcattatgccctaatagaactcagagagcataaactgtctctccattctccactgaagactgggggaattccaggccccctggggagggaagcagctgcaggcagaggactcgcctctccaggacactgcagaaggcaggaaatgtttgctcaggctccaggtcactgagagtggagctgagggggccccagtgacctctcacccttgatacctgagacgtgatgcctgggagtggggagtgggggtggatctggcctatttgggggcaatcctggaatcttgaactatgaaaaaggcttacacagtgacccattccaggggagagaaaaggaacatgagctgcttgtttaaaggtggtggaagacacatcagaacacaccctagcaacaggctcctacaacacggcatctaaacagcagggacagaagaatgtgttgaagcagtcggcagcagcggggccatagggaggtacccagggagcatcgagagtgaggggcttctctctgctatttgcagactaccataaaaggagagaaaaggactccttaagtacataatcggggactttcctgactgagtcaccccaagaaaaggcactcccagttacctcaaaaggtggaaccactttgaaagacttgtttctccagttattcctgttccttgaaaatgatggggtgcctcagacactggcttcagggtttcccaagaggtcagccacacacacatctcaggtcagggtgggccctgcccagaagcgggactgtggtgcccatgagcacagaaagttctggaaggcagggcacacagagctctgcctgcttcagcaagacaatgacagatgtgtcaaaggcacactatttggagtccgaaatattttgggacctgccacttgctggccatataggctttgtcaagtcattcaagccatttagcttctcatctggtgcaagactacctaaatatgctaacagaagggttccttctgctacagggcaaaggtggcacacaaagagtggcagccaggtcatgttagagatgaaaaatagaaagaacagggagagtgggaagagagaagaaaatcccagactgtgccagttcctttgtattccaagcacacagggttagcctttctagagaaggaagaactagagtccacctggacgctgactgcatgcctcggtcagctgctcagaattcaccatagtacatatggccagctcagtcacataggacacacactgccccctctcaaaatacttacagcctgggagaataagaaaaacaagttacgtaatactgagtcctgggcattccccaaaatggctgaaataaattctttttttttttttttgagatggagtcttgctctgtcacccaggctggagtgcaatggcgcgatctcggttcactgcaacctccacctcccaggttcaagcgattctcctgcctcagcctcctgagtagttgggattataggcgcctgctactgtgccaggctaatttttgtattttttttttttagtagagacaaggtttcaccatgggtcaggctggtctcaaactcctgacctcaggtgatccacccgcctcggcctgccaaagtgctgggattacaggcgtgagccaccgcgcccggcccaagtaattcctttcccaagtggccacatacacctatcatccacctttcggctgccagcaaacaggctgtgagtgatgccagttaaccgctccccagatgagcgtggatacttttggctctagatacttggctcttgctcaccatggagactgtgtctgcagccagcatccagtcctgaactttctgggactgatgctgaggttcagcatcgtggcctggcattaatgttctccaaagatctaggacaaggctcagctcaggtcttcctgccttaggaacctgcactgacctcgctcccagggttggttccaaaggtgcagtaattgcaccgtgccagcctcttggcactctgtggagttagggtatgtgccttggcttcctgattagagtccaagctcctggaggctagacagtgcagcccagcacttagcgataggaagcactcagtaacatttgatacgcttgaggaacatgaaagaaccatacctgcttcatgggtcagaacaaacaggaaaggcagtcatagaaggagtccagatttcatacacacacacacacacacacacacacacacacacagtctcatttctacatagcaagcctgagattcagagaaggtgagaagacttggcagccagcaggcaagatcagctgctcttaaaaccaaagggggccgggcgtggtggctcacgcctgtaatcccagcactttgggaggccgaggcagggggatcaccaggtcaggagatcgagaccatcctggctaacacggtgaaaccccatctctattaaatatacaaaaaaattagccgggcgtggtggcgagcacctgtagtcccagctactcgggaggctgaggcaggagaatggcatgaacccgggaggcagagcttgcagtgagccgagattgcaccgctgcactccagcctgggtgacagagcgagactccgtctcaaaaaaaaaaaaaaacaaaaaacaaacaaacaaacaaacaaaaaaacacaaaggggcctggagatgctggtctggggtaaagggaagtgctgaggtccccatgaaaaatagctgggctctggaagctcagcaggagagaaaagataatcaaagaacacccacctctcaaagcacacagtgtctgcccactgatatggctagaaaccataggagcttcaaaaagggttcacttggttaactgagaaattagtcattctgtggatcctaagcaggatctcagccactttgtgtcttcatggctgaccctgctgtttgcagtttcctatacacagcatgcctgtccgagtaattagcccttcgcatgacccaaagtgaccttcagcgagtaactctagcaggcctgggctagctgaagggactactgggcttccggagccttagttatgtctgatgactttcaaaatcatcctggtggaggctttagcctcgtcaaggtactgtgtcttctaggctggtctcctgggctccctgcaagaaaccttttggcttctaagatttggacaagccacctagagtgtggctacacttacagagtaaacttgctctccgagctgaaaacaaggacacaggacaaggacacagaaaggacaagagctcttttaagcagaccagaaagcagaggggtctggggaatggggttttagcactgtacctaaagccatgttgcttttcagccccaaactgccctcaagcccattcctcagttgtcctcattttaccttatacacttctctcctaggatgtctgaattcagagttctgcgcgtgctctacacaactcctcctgcttggaattgcaattaccccacatctctctaatacattaggtgccctgtttttaaaatttatattgtatctctgttggtacaggcatagaacatttctgcaaggaaataagaaagtgtagacagtattagccttcgaggagaaaacggaggtttggtgatctgggatggactggagaccctcctttcctagtaaaattgattgcactgtttgatggagattattattattatttgagatggagtctcgctctgtcaccaggctggagtgaagtggcacgatctcggctcactgcaacctccgcctcccaggttcaagtgattctcctactgcagcctccctagcagctgggactacagtcgcccgccaccacacccagctaattttttgtatttttagtagagacagagtttcaccgtgttagccaggatggtctcgatctcctgccctcatgatctgcctgcctcggcctcccaaagtgctgggattacaggtgtcagtcaccgtgcccggctggtggagattattttttaacatcttcatgcatcacttttccagttaaaaataataaaattcttgtatatgtgtggcaggttttggtgcaaaaaaagaggataatattgtgatttttgtgtcctttcttcatgtccctccagtaggatggctttccagaggcttccattcctcactccgtgacttaatcgactatgagcttggacaagtgtggtggagataatgaggatatgagataacttcatagttatttgaagattgggtgagaaaatccacaaaaagcattcagcacatggcaatactcagtgaaggctattttcctcaactacaggagctttttcctttgatctatttcttgatctacctgtcctcctgatgggacactccctaccctgggaacactggaaacagtttggcaagtggcttcccgggccggaaacagtgactcattggcatctggaatacagaggtttccagaacaatcccactagcaccagctaaaatctatgtctagggattggcagagaggaggggccctggcaagtagaccccctttcctagaaacctctttcctttgatgccagggaacatttgccaagaaatggccataggtctgccacctgcactcagtgtcaacagggaacttccttgatgattaatgtaggaaatgtggggcaaacgtcaactacacttcccgactgaaaactaaaagtgttcgctgaaagtcaaagtagaaggaaaaaagcatatgaggtgccaaaccaatttccaggaacttctccaggatctagctttaggcaaagaaaaacgacttgttctagaaacagtttccttatccgatggaaataaaatgacaggctatgagcatgatgtttcttagtctctcctgatacctccatctggtgaggaacttttattatccctaagccacctgtgacattatacctggacctaagtttcaaattctctgctatcttagcacttttcaagctcttagatttcctgttatctccagaggggcccattctactggtctcttgtttgagaaaaagagaaactgggagaaagagttgttcttttctcttgaatttctgccaaggttttatttcattaattgacaatggatgtgccatgcagatccagccacagggacatatcaccgccctaagcccccacaacttctgcaccctccacccaaacacacatcaccaaaagctgtataaggcacagcaggaaactagcaagaaggaggagagacagacacagacagagatcgcacagagacagtgggacagagatggggacggagcaacctactccacacagtttccaaaaccaagtgcaatgtatatttacactgacccagcaggcagacgctgaagctagtctttttcaggtatgctcagagcatagtagtggcgtcagtggacctagcagctgcagccagctgggcacaccatcccccaccgccctctcccaaatggatgaatggtccccaagcactcacctccttgtccctgcgggctgcatccagggagactatggtgtggccactgtgctcctggcaacagtcctggcagatgcactgctgatcagggcagcagaaggcagacagtgggctgtggtgggcagggcagtatcgccagttgtggtccttcactggctcggtcagcaggtggctttgcagtttgatgttcacctgatgcggctgcaagtgctcttcacagtaattcaccatgcaggttagacaggacttcactgccttcactcttctggtgtcatcaaggcagaagtcacacaggacctctttcccctcaccagcaggatccccctgctctgcagagtcgctgtcctgttcctccgtctccctgccaagcttctccgaggagcccacgtcctcttcttccactgggctggctgacccagaatctgggctgggtgacccagagtctgggctgagaggggctgggggctgagcagtggccctgggcagtggccctggagccattagatccaactcagccatctgggaggctctgctcctaggctgtctttcttctgtcccttggcccaggatctgtgcagcccaagtcagacaagagaaccacgcctagatgattgcagctgctgcaagattttaactgtttcctccctcccagaggaagctcggccactcattactgtgtgctggcgctggatggcagccagatgcgatgacgacaaggcagctagagtactcaggctcaggacagccggctcaggctcaggctgcctccccaggtccagccctgaaacttctattcttatgtgaatcatctgaaccccataggctctgctgaagaccacgtgtctctgtgcctgctctggaaaggacagaagattcctgagctctgttataagcctgtgtggctttgtgtggtctgacaagcgacatttttttttgttttcatttttaaagagaagtaaaatgtaaggacttcaacaccaggacagccattcatctactcccatctcatagaactggacatgaggcagctaggaataggatgcatgtttcttttcttttctttttttttttttttgagacagagtctcactctgtcacccaggctggagtgcagtggtgtgatctcggctcactgcaacctccgccctccgagttcaagtgattctcctgcctcagcctcccgagtagctgggattacaggcacctgccaccgtgcccggctaatttcttttttttttttttgtatttttagtagagacggggtttcaccatcttggccaggctggtcttgaacccctgatctcgtgatccacccgcctcggcctcccaaagtgctaggattacaggtgagccacggtgcccaccttttttttttttttttttttttttttgagacacagtctcactctgtcgcccaggctggagtgcagtgtgggatcttggctcactgcaacctccgcctcctgggtttgtgattcttctgcctcagcctcctgagtagctgggattacaggcacccaccaccacgcctggctcatttttgtattattagtagagacagtgtttcaccatgttggccaggctggtctcgaacccttgacctcaggtgatctgcctgcctgggcttcccaatgtgctgggattacaggcatgagccactgtgcccagccaggatgcatacttctgatgctgacttttccatatcatcttcctgaacattccagtaatgtccgtcacactcgtggagatgaacatcacgtgggtactcagtggagatcaggagggtcagggaagacttgtctccttccacagaatgctcccttcaggttaacagcccttttgcccacttaacgaaacattcctagacatggtgttatagttgagacacttgttcccacaaacctcatgctgagatttgatccccaatactggaggtggggcctggtgggaggtgtttgggtcataggggtggatccctcatgaacggctcggtgccatccccacagtgatgagtgagttctcgttctatcaatattagctgccacaagatctgattgttaaaaaagagcctggcaccaccccctctcttaattcctctctctccatgtgacctgcccactccagctcccctaccccttccactgtggatggaagcggcctgaggccctcaccagaagcagatgccagcaccatgcttcttgtacagcctgcaaaaccgtgagccaaaagatctgttttctttatacgttacccccaccccctcaggtattcctttacagcaacacaaacacagtaagacgcatggtgtgtgagcttgccagggctgccatagcaaagaaccatacactggttggcttcaacaacagaaactcatttcctcacagttctagaagctggatcaagtcactggcagggatgctttcttctgaggcctctctccttggcttgcagatggcttctcctatgtcttcacatggtcttccctttgtacgtatctgtgtcctaatctcctcttcttataagaacaccagtaagactagattagggcccaccctcaattacctgtttaaagactttctccccaaatacagtcacatctgaggtattaagggcaaagatttcaacatacacatttgtaggggaaggagacacaattcagcccgtaacacacggtcagggcatgagcttggaagcctctagctccttagaagaaagaggctgcgaggcatgacccctggacgggggtacacagtgtacccagcgtttgcagatggatacaaaggaatccaggattattccagggtacctgaaccccaaattctagagctttctacagttttccctgggattatttaatcagatacatttgaactcaaatgaatttggaaggcgaatggaagagagagagattgggtggagggggaggggtcagatccacctagccccagggatcaggcattaggatggttccaagatattacactccctatggctctgcatccctgcggtgagttctataggatttggattaaactaaataaacacagggatgtttcttgtcactgactagtacttttcagaaatccgagagacctagtgactactcagagttagaaggcaccgaagactttacaaattcattccagacacagtgctgtttattttcaaccacgcatagaatacgcataagtagccctttttagcgatgtaacgtttcctcactgtccctgtcctgactgccctcttccactgctgaagaccctcaggagaggtttccttctttctgatcctggccagggtcagaaacatgcatcctattcctagctgcctcaggtccagttctactggaaaaggaattaaaagaaattaaagaacgtgtaagcaaaaattcattgtatgtaagaaaacccaattccccctgaggaagagaaagagctgaagtcctttaaaaattaactgcttgtttttctgtggccagtgagccttttctctccctttcccaggcattgtgaagacgctgtttctctagctctgcagctgcaaggtcactaggcagataaactcaagttgtaaaacatgttttttccttgaaaagtaagaaatgatgtaatgcatgtcttaattgaataactgtctttgtttctcgcttctgtaatatgcttccccctgcacagatctccccctgccccataaaatgcttaaaaggtaaccagactatttgttcgggctcagtctttttggatgttaatctgactgggccagtgcacctaaataataaataataagtatcctcctcaatcccttggtctctttgattccttaattatcccacagcactatgagatggggaaagatgaatagctgtcccgtcattgaagtccttatattttgagtcctttttaaaaattgaaaaaaaaaaatgtagcttgtcagagaccacacaaagccatacaggcttctgtcagagctctggaatttaatttcatggttttcatgtctccagccaggaggactggcttctcccagtccagaccattgtcagtgttttctccagtattaatggacaggtggctttccttttaatccctttttcagagtgacctggtactggaggctgaactggtccacccgcataccatagggcctctgatctctctgagaatggggaagaaaaggtagttgccctgcctggccctttctacagcttcagtagaaatcagaaggcatacatcctgcttgggtttccacgtggctcacttcttcctcattccttccctccctatctcattcccaccctttcttctctcatgaattgtttcatacctgcttctctatggctaacccttttagagcagttcatgggagtgctcagcccttcatcaatgccccactgaagtcctgagctagcagacattccacagtggtgtggaaaacaggaaatgggaatgtgggccctagcctggcctgtgccaatcatttgatctctctctttttttttttttgagacggagtatcgctctgtcgcccaggctggagttcagtggcatgatctcggctcactgcaagctctgcctcccgggttcatgccattctcctgcctcagcctcccgagtagctgggactacacgcacccaccaccatgcctggttaattttttgtatttttagtagagacggggtttcaccgtgttagccaggatggtctcaatctcctgacctcgtgatctgcccgcctcggcctcccaaagtgctgggagtacaggtgtgagccaccgcgcccaacgcgtgtccccacttaaccttagtttccttgtccatgaaatgagtatgttgtcctaagtcagggccggtaaatcaatttctagtttggccctctgaggaattatgttgcggtggggtctaagtgcatgtccgagctcaatgggagacggcatcatgctcaggttgggatatttggcaggggcatgggattaggagtggtggcccctctggaggctcatcttcagccctctgggaccacaaaattcaccacaacttctaagtcccctctaatgccaaccctcaaagcagaacaccactaggcccaagctctgatcctgcttccagggacagtgacacatcccatcaagtctcaaatgcccatgctcaaacccccagcacccaaatattgaggctagaaagtcacatgattcttttgaactcaaattccctattgcttcaaaggctctacagtcaccaccccactttgctcccactgagccctggggcatcttgatactctgtctctcctcggattctgctttgctccttgtcttaaccaaaacttgaatgtcccccaaagacaatttctcctgccacctctcaacccgtgtagctccttctctcatttcctatgcctaggtggatgggagtcctcctcagcccccatcacaacatctagaccatcgcccctccccagcccctttgcaaaccctgctccccttatgtgccccaaaataccacgcctcctctcctcctggctgtcttctacagcctcccagtcattccccttagtgacagaagatttaacgcttctggctcccagcctccccctctaccccagctctgttattctcagaacgttctacctctgaatgccttctttgttttttatttggttggtttggtttttgttttttgaaacagggtctcaaaactttgtcgcccaggctgtaacgtagtggtgcaatcacagctcactgcagcctcaacctcccaggctcaagtgatcctcccacctcagccctcagcctcccaagtagctgggactacaagtgctccaccacacttggctaatttgtaagtttttaaattttttgtagagatggggtctcactatgttgcccaggtgagtttcaaactcctgggctcatgcaatcctcccttcacaacctcccaaactgctgggattacaagtgtgagccactgcatccagcctctgaatgcttgccacctaccctatggtcaccacccacatctggatttatttttatttttaattgtgataaaatacagataaatacacataaaatacaaataacataaaatttaccatcttaactgcttttattaaaagacaggatcttgttatgttgcccaggctgggttgtttgtttgtttgtctttgagacagggtctccctctgttgcccaggctagattgtagtggtgtgatcacagctcacggcagccttgaactcctgggctcaagtgatcctcccatctccacctcccaagtagctgggattacaggtgcacactactgtgcctggctcattataaccattggtaagtgtacagttcagtggctttaagtacattcacactgttgtgcagttgtcaccaccatctatctccacaactcttttcatcttgcaaaactgaaactgtagccattaaccaataactcctcattccctctccccctccagcctttggaagctaccgttctactttctgtctataattgtgactactctaggcacttcataggagtgaaatcatacagtgtttgtctttttgtgactggcttatttcacttggcataatgtcttcaaggttcattcatatcgtagcatgcatctgaatttccttcctcacacctggagtctgcattcaacagaaatcccaacctccaaacttaagaattgagaatcctactgactatgcctacagcttgcttaaatgccccgtggaaaaaatgcctcaggttcatcaggtgttgattggacatcattggcttcctcttaaccccaagcattcaggggctaaaatgaagtatctcttgcataaaatgaagtgtctctcttgccttcacaaaacaaatgtaacttcacctagatattcttttttcctaaaccaaacctaccaccaggaatgtgaggtcaaggtgtggttcaggattcctttccagaattgagggaggaatccccacccagaattctgatgactcaaatgctaccaagatatgtggtaggcaattggcagtaggtaggtaagtattcatctttcatcctgttgagtcttgacaaataatcccaccaatggacaaactctgaaagttatgtcctctgaaaggatataagcaatgcctgccaacaggttccctcctggtttaggggtttaaggccatcattctcaggactctaggttaactcaagtaagaagagctttcttaacccaaagactctctctagcagtttctggctaaagaagctatccaagcgtttttgctaagccaaaacagcctttcatttgtctcttcaaaaatctcactggatttttttcctcatttgtgtctctgctgagtcacacagagctatgattcacaaacacaggtaatatttgtccaccagacttcaagacaaatcagcccatcagactgagaaaaataaaaataatatcataaactgatcgtaaccctgaatttgattgatttatgggactgtactttattgagattgtgtccttcctccttttctggaattaaaggtcttatcttttctgaaataatagtaatgagtgtaggattgggaatgtccggaagagtgacatctaagtcagtcctccaaattcactttgcaatttttctcgtaaaatctcaaagtctgagaaccactgagctggaagtcgcatcactcctctagaaaccagcccagaattttactggcttacctggaggtgcaggcccaatgaactttctggtttggggtcactatcagcaaactggtctccagccctgtctttctcctaaaagaagaagatggcctcttggatcactttggtaattaattaccactaacaaaggaacgaaataaaggtgagacaaacagcagattacagacactaagggccgttgctcctagtctcagaacacgattgttgtaatgacggctcctccgcaagaaggaggggctgtcccagggcactgcgtgtaccttcccttcacaaagacaggaggacacaccagttggtacagagacgagattgccagctcagtacctggcacacagcctgaaggaccccactactggatgaagaaaacaccgaagtcagcttcaactatgcccttagcgacggacatctgccagctaaggaggtgcaccacggtcatttcttccctaagtctccgaaggtctagtcctgggctgttctagggttctcttttgtcttccagtgaggtgtggctgtggtgcacgggcaccgctttgatcacttctcagaccacccaagcttacggggccagaattagcagctagaccacctagaaacctacttgggggagtctgcaatgccctggaaatggagagctcaagaatttgaccacatctcaaatgactctcagtaaattccagacacaagggcgtgacattttatgcggcacatagcacatttgaactatgctttgttgaatctccatatcaacctctgtaataactctaacattggtatgaaacccaaataatcacacaaatctaactctagttacctttatggcttatgcctaaaaatgtcaaaacaacctacacataataaatgaagtaaatctttaaaaaatctgtaacaaatgttctcttgccctgggacaggagatggtttcccaggccggctcccctgaggccctgagccaattgttgtttcagcactgctggttttctagaacttgggcagctgtccagctcccagtcaaaatgggcacctctaatcttgctatttgctgggataccacacattccagggagccgcactcaccttcaaaaagggcagacttatctcaggccaggtgtgaatgcctccagggcactgagaagcagctcagcaaggccaatggccagggcagggcaggccgggcttgctgggcaggagcacacaggtaggtaagcgaacagacaccttcaggtagcaacaagttacagggtgagggtgagggtcctcttgtttttactagtgagatatagcccttcagtgttggaaagaatctcagaaaaccatcccctccacccttcaccttcccaatatttactcagaggtttgttttttctttttttaaacaataagtaaggaccacagacctagacccctcaacaaaggaaggaaaaagcattgttcattcaagggccaaaaaatgtgcccctccctcgattgctgtggccagggccagaggacaatgagccggttcctctataaacaacatagtctgcctcagccaagtccgctagggatggcttatgtctcagcagccactgaagctcaattcttcattccacttcccctaggacactcatttgctcaaatggttttgatttccacctcactgctgaaaaccagatggttaaacactccatatttctatacccctgattgtctgcatggaggaagcctaacatctgtacgtgggtttcctgggatgagaggcagccctcctccaatcatggtgcatagactcaggaagcaaacaaagcaacaagaatgctcgaaagaatacagaggggccgggcgcggtggctcacacctgtaatcccagcactttgggaggccgaggtgggtggatcacgaggtcaggagattgagaacaacctggctaacacggtgaaaccccatctctactaaaaatacaaaaaattagccgggcgtggtggcaggcgcctgtagtcccagctacttgggaggctgaggcaggagaatggtgtgaacctgggaggcagagcttgcagtgagccaagatcgtgccactgcactccagcctgggcgacagagcgagactccatctcaaaaaaaaaaaaaaaaaaaaaaaaagaacacagagggggctattgcctccgtgagagcaaaataaccactgccttgtcaagagtattttagtaggaaggaaacaggcatattaatcagaagacctggtaaatggtagatgttatggagggctcccaatatggtcagaaagaaaatctggagttagaagtgtcaagtggtcagagtcctgatcccagcaccttttagctgtgtgacctttgtaagtagcttacctctctgaatctgtttcctcctctaaaatggggatgtagtatctgctccaataaacttacaacaaccttacaaaaaccttacagtttgtgagaaaatgaaagtgaacacatcatgcaaatgcaaaggaacttgtatgctaatcttatgggtacaaacacagcaggatttgaggaggtgaaggctccttccagcgagttctcttaagctgtgagacaaggagctggccaaggatcaccctcctctctctaaaatgtaagaaaccccaacttccccagaagcctgtcacatttataggcaacattcatatttcgcagctcctttccctgtgtactaagcaagggtctcggatctgcccaacccctcctctcagtgtttcttggagtccctggggcactgtcttccactgggcaccttcttttcctatcattgctgcctctgatgccctgcagtccaaatggtgcccaggttgcctggtaatgaagtataatatattgtttgttagatgaagcccagagcaaggatgcttagtacaatgtgtccctctaatgttactgaaactgctcattctctttactcagagcgccttttctcccttaagctccatgacgccatggaagctggcttgagagcagctcctagtgacagattctggcctatttagacccactttcccactctgaccctgaaattctgaggtgtagctaagcttataattaactccttctctcaggatgcattttccattaggaggcccctgctggggtgccccacaagtgaactacacaggcccaggcatctgaatcccaaactcaagctccgttctaaatacctcctggaagaacatagctttttgttttttcttccacagtttggaaaacatgaccctccgacatccatgcactccagctcccaggatgggctctgtttatctgcaccagacttggttactgcagcctgtcggccagtggtgactgcttcagggataaagaagtctttgcaaatttaagttgatgatatatggaaagaacactgatggcgtttccttggctcttaaaagagatatttgtaaaaccggcctctttccccatgaggagtcagaaatggggactcccaatgatggagtcagaatttaaatgcacacttgtgactccaaagcttaaaaagctactgtgggggaccttcttgtggatcctgggataggaagtggctgctcctgagtccctccagttttcttgagtcccagattccttaacacaacttcactgggctttctttaaacttcttagttgatactcacccatttcttctactatttacacacaatgcacacattctattttgaatctcctggttttccattcttaaatttcatctttcctgtagttggacccgcagaacatgccagcctcaactcccaaagagcatttctagcacaaagctattattttcattcatgtgttgtctcgagcttgagagcagatcagcctttgaaagctgccactgctgctgccaccaccagcaccatcatagctgactacacattctgtgcagggactgtgctaagcagggaatacattatctacatgagatacagggttttacagataagaaaacagtaacttaatgagattgggtaactgacccaaacccatacatctgatatatagtggagtcagaattcaaatgcacactggtgattacagggccagaagcggtcttggtaggctacatgaggacgttctggctaattccaggatagggcagggctactactaggtatcttacagttgctcagaggagagggaggtggtgactcactagcagatttgtgagtttctttagacttgggctggtggtgaagaagctgggctgtgaaccctcagttcctaattgactgtcagctctgtcttctcgggagccttctcctccccaagagaggaggacaagggcacaataccccctcaggaactggcatttcttctttctcctgaaacatctttcctcattttaactctttcccaaccacccaagtgccctctggatacgtccatttgtcccagtctggcctggcctggcaggtaacttggaaaatatttgcacgtgccactctcctctccactcaggatcgcttcattcattcattatttattctgcagccattagatgctgaacactagatacttatttgtggaggtcacaaaataagtacagaatatgacacacgccctgcccatgaagagcacagctgccagttctatatttacaatatctctggaattccaccttcccttctaatttgactgatatttctgcttctcaggcagcagcagccttctggcaaccatgagaaccaacgtgaggactaggtcagtaagccgaggataaagaaacagaaaaatggaaagagccccagtgacactgttgagctgttaaactatctaaactgcttgttttcaggctttaaatcatgtaagataacgtgtccttattgctgcagccggaagcatcctaaatggtacactctctccaggtgccaggaaagatgccaaatagcaggcccaaactgtctccttacagcttggggtccaaaactggaaaggaccttgtccctaccagtctccatacaatgaatgccatgagagaactctggctgatcctgttcactccgcttgcccaccccgggtcaatcccatgtctggtcagatgcagtgctgtcatcagcccaggatgcagtattgggttatgggtctcccatgtggccacaatggagggcactgtgtttgactaaaaccacacgtggtgtgtacaggccccatggtgaatacagacagaccacagcaaaccatctgctaaaatggggtttaaaaatgaagttaacacttggttccgagatccatctatgaaagcaaaacaggttctaggagccagatgtggcagcggttgtatggcagaaagggtggtacaggtggatttcatacattgatacttaaaaagggagaaaagggcaagaaatccattttaaggttgaagaagcagcacagatgatcccatcttctcttctagggcagagaagcaggcacaggtgaaactcaaaacagagcacgtagcaggactggacgtagccttagggaacctaggcttgggttaagctgaaaaagtatgaatctattcagcaccaggtttggccacaactggttagagaatttgtaaagcacagaagacggggacagtaaatatgagagctggaggagagtgaaagtaatgaaagccagtgggcatggtggctcacacctgtaatcccagcattctaggaggccgaggtgggcggatcacttgaggtcaggagtttgagtgacaacaaaggtgggcaaaacactgatgtgatccagacagagacgacctgtggccacaagcgccctgttctgtttagatctgcgctctcttcccagcaggatccatcaactctagcgtctcagagctagacagactacgtcctaggaaaatgcgcctcggggaggcttcctgagtgaagtggctcctgtcacagtatcaacgtcatgatgtgtcttatatctgctgccccgaccaagaaccaggaaacaggccgggcgcggtggctcactcctgtcatcccagcgctctggaaggccaaggtgggtggatcacttgagatcagttcgagatcagcctggccaacatggtgaaaccccgactctactaaaaatacaaaaattagccaggtgtggtggcatgtgcctataatcccagctacttgggagggtgaggtgggaggattgcttgaacccgggaggtggaggttgcagtgagcagagatggcaccattgcactccagcctgggcaacagagtgagactccgtctcaaaaaaaaaaaaaaaaaaaaaaggcataggcagttgggtggtactgtaaaccacctgctcaacagggtgtgtttgcttctggaaagttttattatttgcttttttaagctgctgctatacaactcactgaaaaccaacttttcattatttaatggcatgagaaaaggatcacattaagtagttttaaagaggctgtagaggccgggcgcagtggctcatgcctgtaatcccagcactttgggaggctgcggcgggcagatcacgaggtcagatcgagaccatcctggctaacccagtgaaaccccatctctactaaaaacacaaaaaattagccgggcatggtggtgggtgcctgtagtcccagctactcaggaggctgaggcaggagaatggcgtgaacccggaaggcagagcttgccatgagccgaaatggtgccactgcactccagcctaggcgagagtgcaagactctatctaaaaaataaaaagaataaaaaaaataaagaaagaaaacaacataatgtatcgggaaaccagataatgaatgggtaacattcaagtgataacacattctcctggctgcccacatctcagtggccattacttttcagtccaattttcttattcctcttcctctgcctgaaaaggtgagaggctctttgaagctcaactcaagatcacttcttcccaacttagtctctcttcctagatgagctcatccattcctacgccttcagttaccacctgtttatggctcacaaactgatgtctcagctcaactttcagacctgtatatccaactactttctaagtataaagacttgactttctcacaggcaccttgaatctaatgcatccaaaattaaatgtaaggcctccctagatcccaacacaacaaatttaaccctcctcatgttcttttctcagagattgccaccagcacccaactagattacaaatcagaaacccagggagcatccctacctcctctctttccgtcacaacccatgtccataccatcaccattttacatctcacacatctccaaaccctttaccctttatatttccactgctattactagagtccaagccatcattgtctctcgcctggattatggcaataggctccacactagaattcctacatctactcattgcttttgccaatccattctccattctgcatccagagaaagcttttcatttatgtatttatttatttttattttttagagatagggtctcactgtattgcccaagttagactcgaactcctgctctcaagtgatccttttgccttggcctcccaaagtgttgggattataagcgtgagccactgcacccaccctcagagaaagctttttaaaaaaatcaactttactgaggtatactttacatgcaataaaattcacctattttaagcatccaggtgaatgagttttgacaaataactccattctggtaaccaccacccaatcaagatagagaatattggcagcacccaggaagctccctcatgcccttttattcaatctttctaccatgcctggttccaggcaacgaagaatctgagttttatcattataaattagttttgcttgtgctggaacttcatataaatggaaatatatagtaggcactattgtgtctggcttatttcactcaataaaacatctatgagattcatccatgtcatggtgcgtatcagtagcctgttgttttcactgctgagtagcattccatgctatgtctgtaaccaagcgtgttcatccattaccctgctgatgagcatttgggtttgttctacatttgggctatttggtattatctttaccccatccttttaccagcctacctggctcttgatatttaaaatgcatctcttacgggcatcgtgtaagaaagtcttgttttttattcagtctaataatctctgccttgggggggcggtggatggagcagaactaataggcttatgaatgggataagtctaaaagcataaagtatttgtagagtcttgccttccttcatcttacataaactccagatacctgctgttacccagtggttctaaaagcaagatctatggacccttgatgcttcactgagaccctttcagggatgtgtgaggtcaaaactattttcatgataacacttgagtattctttgctattttcaccatattgtcatttgcgcaatgatgcaggagcaatagtgagtaaaattgctgaggcctcagcacatatcaaagcagtggcaccaaactgtgctagcagtcattgtacttttccacacactcaaaaattgaaaataaattttaaaaaaagccagtttcatttaagaatgtacttgataacaacagtaaaaattattaatttcattatatctcaactctcgagtacatgactttataacattctaagtaacaaaataggacttctgattgttttccagcaaaaatgtacacgtgcaattgtgtaagatgcaagcagaagtagctttttttttcccccagagagaatatttatcaattaacttcctgatacacatctatgatactttcttcttcctatatgttttggttgacttctcttcgaatgcttcttcatctaagaattccatcatttctatggaaagaataaattctctaccatggtagatcaaactcttttttaaagagttcctatataccccacacccaataggggtacataagacccttcaatctttctaccacaggggtacacaacacctctactgttaacatcttacgttactctatgatagtttgtcacaattaatgaactaatattgatacattattaactgacgtccatacttactcagattttcttttttttttttctagtgtcctttgtatgtcccaggatcccgccgggacactgttccactctcaaccccacagtagccactatcttataacccttgagtgatctcacctagctcatgttcagcttgcctctcaaccttcggcttacaagggacctatccatgtactcgtgtacgctcttatacaactccctcctctctgtatctcaccccgcacgatctatctgcttccgctgctctgaaccctgatttccacatcctccactccgtgggaccactgtgctctacatggactccagctatctgtgccatggttggaagtagttctaagacagaaagttgggtgatcatggggttcacctcatgagtttccctctgtctgggatcagtagttctgtgctacctattgttcactgcctgaaaatagttgtctcatctattttgtcatgttgtatagcagtttatggtgggagggctagcctagtaccagttactccatcatagccagaagcagaaatccaaagaaagcttcaaaaaatataagtctgatcatgtcacttctctggttaaaatctttccatggctctaagaataaagatccaaatttgaaaatggcccgtggggtcttgtatgatctgagccaaacctgtgctccagcgtcattccccctcttcctcaggccctcgttccttccttagcctctggccttccttcagtcccttgccgttttctcctgtctctaggcttttgcacatgaaaacacacttttgcacatgaaaacacaccaccaaacattcttcccatccttcttcaccaaccagctacaagccacaataaataaaacactgtgaaactagcacagcattagatggaacacagtccaaaaacagattcatatacgtatatatttcaactcagtgagaaagggaggaattattcaataaggacaattagttcaattggctagctatgttatccttaacttatcccatattcaaaaagaaacttcagacaaagcattaataagcaaaatgtataaggaactactccaaattgataaaaagaaagcaacccaataaaaagtggaaaaaggaaatgaaaaggcaattcatggaagaactacaaataactgataaacatagaaaaataaacataggaaaagacattcaacattattaagaatgaaatataataaaatatatattaaaaataaaatcttgatagtatccaatgtttgggagagaaaaaggcactctgctacactgttagagtataaactagtacagccaattcatcaatattttaaatgtactctgacccagctctcacatttccaggaatctatcctacagaaatagcagcatgaccactgaattgcctctatcagtaaaaaaaactggaaagaacccaaatgcccattaataagaatatatagaaattataggacatccatacgtcagaacacaatgcatccatttaaaaaaatgagatacctctaaattatttttaaagatgtctaaagtataatgttgaaagttataagtgagttgaaaaacaaacagtacactactagttatgcatgcatacatatacacgcacaagcaaagaatctaaaaagatacacatcaattctaaagggtaggatttcaagggggaactcaggaagccctttcttttacttatacacttctacagtatactatttgattctgtcacaaagaatatttcacttttgtaatgtaaaaaatgtttaagtgtactttttgaaaaagagaatagattcgctattacaatcaactgctcacggtgaactactgtagtttaacattgcagcaggaggctgtaccaccacctcgtggggatatactgccacagtaaattggttatctaaaaattcctgaatctcagtgctactgccgttttgggtgggacaatccttttttgtaggggctgtcccgtgcattgtaggatgattagcagtatcccttgcctctatcctctaggtgccagtaacaccccctcccccaattgtgacaaccaaaactctctccagacactggcagttgtctcctggagggggaaaatctcccctggttgagaaccactaacgtgaaagaatgagtcttgtgagtgcaaagtagagaaacaaaaggtgttcactcattcactcataagaatatcacaccaggtaaagtcttcatgagataattccctcatgtcagttagaatgagtgttctaacccacaggtgcatgcacacagaattattttcatagcttgaagatattctgcagtttaaattcagtaagaagaaaacccattttcatccagtaaatccccaattgccacagggcagaagcaacaaggatgcaaagcctgtcacatgtatccagactctattcccaggcccagggcaggacttcaaagcactctgtaccatggcctcatcacagtgctccagtcaataactaccactaaatgtaaaccagctccctcctgtccctcaatcagccgctaatttcccccacgtcgaagcgtccctatgcccattgctctcccagatgctctctatggtctacatgtcacagaaaggtcttttttttatgcagggttgggaggtctgtggaagctcagctccactatccactgccctcaccccaaatagcacgggcatatcatttaacctttccagatctccatctcctcacttgcaaaataaaaggcccatattatatattcaaagttccctttggttctaaaatctatgaacagggatgatgacaaatgatccactgtaggctttctatacaattgtaagtattttctccactgaagattattctacatacaattaggttggtgttactggaatctttttaatttctagtgttggggtcctataaaaaccgtgatactgaataagcaaagaatcctaagccatgacttcactatacagttactgtatttctagggttttgtttttgtcagtgtgcatcatctgatatcaataatatacaaatgaatattgtctaatgtcttcccactttcactatagtcacatttattccaggactaatatatgaagctgattaaggttacgtggagtttttttggacttggattaatctgaagtgcttctttattcaccgtgttgctgtatcctagcaatcttcctactaggataaattggcatatcttctgatacagtcaactttggcaaaccaaggaaaaacactcaggaagaggaataaactagcacacgaatgaactgactgggcctctagattcactgaagtcgtgctcttacacaaggttacttctgtagtcagcatgtaagatgaaaacagggcaataccaatattgtctttataaatccttgaatttgcccataaaatacacctagttttgtgtatagctctgataataactcatgaatagataaatatagaattttatataggtgtgcaaaacataattttatagtattcttaattacactaatttatcttttggtttggggggatatcttggtgcatatgggtgaattcttgttaagtaaaatataagtatgagatgatttttcctgagatgtttatctcaagccactgtattttgcatagatgactcttggcaaaacatacccagcagtcatcaaatatacgatatatatctaacaggtcaaagttcctagaagaatgacttttcattgaaaaactctatttcacgtgatttttttaaccgtatgcaagtattattttgtgtaaaatcagcaacgaaagccctaaacaaagataggtttccctcatcatgatgataatgatgttaaaatcatgatccctgatgatgttaagattgagaataaggccggatattagtatcaaaccaaaattgtcatgtttcataggcatatgtgagtgatataaatagtaagtaagcagcactggtattcagaggaggagattattttcagttacagtggccaagaggtgagggtggaggtaataccttaagctgggtcctaaaggagactaacttgcaaaatgaaaagagtgataacgtgacaactgcctcttaacttaaagaaaacctaaaaagtattaatgcctcctccgaaaagacagaaagccctactttaatcactaaatatctcttcctgcaatcctcaaatcaagcctggggtcaccctagttagtttatcacaacagtgcaaattattcaggataatttgcttggaggaattaatttaacatataaattaattttcccttcattggacacatatcagccaagcatacaggcaattttaacatataagttagaaaattagacactcatgatttaaaaactaaagaatccagattacctaccaaaaagagatcaaaatatcagaacatttactatctaaagccccaaatcaaacccccaccccagactttaccacaaccaaacaaacacactgagctttagcttaggttgtaaaaggagaggaattatattctccatcatgaagggtaagtgtggtctacactacagcccacgaaagagaaccctgttatagaaatatccaaatgctgggcgtggcggctcatgccagtaatgccagcacttcaggaagctaaggtgggcagactgcttgagctcaagagttcaagaccagtctgggctatatggcaaaacaccatctacaaaaaatacaaacaaattagccgggtgtggtgacgcttgcctgtggtcccagctactcgggaggctgaggtgggaggatcaaggatcctgagagttcaaggctgcagtgagctgtgatggcgtcactgcactccagcccaggcaatagagcaaaaccctgtctcaaacaaacaaacaaacaaactaatctgagaggagagcacaagcatagaccatactactaacagtacagtcagagtaaactgaaacaaaacaaaaaaggctctgtaagtcccagagtcataatatttctagaactgttctgatttcaaatatttcatcactataatgtcctcaaaattttaatatttctggatccaaattatatttaggctacaagagaattataccaattcactatagtacaatccacgaattcatgcaatccacccattctaggacagaccttttgttcaaggacatctgtcttcagtctttagttctaaaataaattaccaaagatgaggactctgaaggaacaacaatggtttctaccaatccaaagccaactggctccaggaactatgtttggaaatgaccttgttaccaattgttaacaaacattactttaagaagtcttattctaatgacagacactcttatagacgaccctccccaccccttttcaatttcttaaagttacgaaggattttgggcatttcaaaaattatttccagatatcaccgtttattcagagtggtctgtctcaccgctaattttcagaacaaaaatcctttcttctctaacttcagttgtgccttctgtaattcaagccctgttaaatttcaagctgtactaacaccgacttctttaaacagaagagaaggataggaaagcaggtgaggagagagagttcagaatagcccttttagtgagaaaaatagaaagcagggaaatctcaggttctggctagtacactgggaatgatatgggaaagtcaagggactccaatcctatacaattggattactctcaggtaactgaaatgcatctaaaacaggaagaaaaaaaaaaggcagggaaaataattcatggaaaccaaaaaagttactctaacatcaatttaagcttaggaagatttgaaagaaaaaaaaaagtttgcatgtaagtgttgagtcacagcataaccaaaaaataatgcctggctttattaggtacacataaaatttcttagagccatatacagaaattttcatcaggcagcctcaagtaacttaatctggtgatagtctgatacaaattcatatgaccatttttttaaaaatgttttctaaaagtgttgactcaatcttccctaactcttctgttgggattgcataatagttactatgtaaggctgacagtttccaaggtaaacggttcttactttctgagaactgatagttataatttcagccttaaggaaggggaaaaaaaagaaaattctaagaaaggggagatggaaaaagcaaaatagattcctcatcaacagaagacacaataggccgggcgcggtggctcacgcctgtaatcccagcactttgggaggctgagacgggcggatcatgaggtcaagagattgagaccatcctggccaacatggtgaaaccctgtctctacaaaaaatacaaaaattagccgggcatggtgacgggcacctgtagtcccagctacttgggaggctgaggcaggagaatcacttgaacctgggaggcggaggtcacagtgagctgagatcatgccattgcactccagcctggtgacagagcaagactccgtctcaaaaaaaaaaaagacacaataacattaaagagctattttgagataagtgaaaaaagatttctgaaaaggtagatgtaacagagtttggccccatttttgatgtctggccattgacagcatttaagtttccaccattttctattctcccctcccccacactgccccaccgcacacctggtgctttagataaagaaatccatgggcatctcctgagctcccagcactggcaggaagcttgaatccctcaagcccacagatcgaatgctctccagccccattccctagctactttaaaggcccagcctcctctctgttcttgccattttggaccagctttcatctatcctgctctccccagaaaccctgtgtatgaatagtaaactttcaagttctcttagtgtgtgaaatgtcatcagtcttgacatctggcctattaactgagtccctcatctcccggggggtgatcacaaaacagtgggatgaggtaaagcaaacaaaagctgcccacaggagggtatgagctgggggcaggaatgactacagattaaggcaaagttttataggaaggtggtattaggatatgtaattagctatgagcttctttattttgtttggacatggcactatttccatcagtacaagaaggggcaacaagctcagttctgcacaactagaatttcttggcttattcctgaggccagggaaggggggtaaaatcactgcatggtgacagcagtcatttcaggtacagacaaaaatacacacatatacatataaaaattgagctttagagtctattaggctagtccagatttcagttcagtgtttcttcacttggatttgtgatattctgatagctttgcaagagaaaataaccagggtaggagaggagggattttcatcccttaaaatataataaagcatcgccactgtaacaacctataaaagtataattctttggtatttaaccaaatgaagagtctgagtggatttgtccagacattcagggagattctccactgtgaagtctctggtgtctaatgagggctgaactacacgaaagctctgccacatttatgtgacagaactcataccggagaaaaaccctacaagtgtaaagaatgtggtgaagccttcagtcagagctcaactcttacaaaacatataaaggtctacactggagagaaaccctacacctgtaaagactgtaggaaagccttcagccagagttcatctcttacccagcatcagagggttcatactggaaagaaaccatttgattgtcaggagtgtgggaaagccttcagtagaagcgcccatgttacccaacatcagaggatccacactggagagaagccctgtgtatatacacatacgtatgtgtatgtatacatacgtatgtgtatatacacatacgtatatatacatgtgtatatacatatatatttgcatatataatataaaaatatatatattatatactatacatatatatatacttttttttgcagatacttgaatgtttgtgttcgttagagttctaggctctcttgtaactctttttgtgctctttgggtgatattatccactcccatggcttcaatttcatccattctcaggcaactcccaaatctgtacccccagttaagatctctttcctttactaagatacatttggcatgtcgtccttatattcatctagcctccagacattaccacttagagcaggttttctcaactgcagcactgttgccgttttagacagacaagtctttgtgtggggccccgtcctgtgcattgtaggatgtttagcagcattcctggactccactcacgagatgcccatagcacacttcagacgttgccaaatgtcccccggggggcaaacttgcccctggttaagaaccactggtttagacttattatagacacttcaaacaacttaagagaaactgaactcatcttccactccctaaatttgctacttctcctgtgttttccatctcagggaagagaacttccattcacctacacatccagaccagaaacctgagaattttttcttttttttttttttttttcttgagatggagtctcgctctgtcacccaggctggagtgcaatggcatgatctcggctcgctgcaagccccacctcctggggttcacgccattctcctgcctcaacctcccaagtagctgggactacaggtgcccgccaccacgcccggctaattttttgtatttttagtacagatggggtttcaccatgttagccaggatggtctccatctcctgacctcgtgatccgcccgcctcggcctcccaaagtgctgggattataggcgtgagccactgcgcctggccgaaacctgagaattttctttgttactccctcacctctcaaatctacacaacaaattatgtcaattttatatccttaaaattattcaaattctttccttctcttcatatttcttatatagcagaaaactaggtaggataaggacagagtaaatgaagaagtgattccagctactaaagaggaaatgggaatagcctcataaaatgcctcaggatgaggcacaaagctgatctctggatcatgtgttgggcttataactttaaggaggaagtatctcttccttgagtctgggaagaaataaagaggtaagctattaggattctgatgtggtcaagtgaagatgagactgcagggggattcaacattttctacaggcccggaggatttgggaagaacccctaactcttatttctaaagatgcaatctgccttgttctcacttacgtgtaccgctgcttcttggcacctctccctcctgcatttgtgttcgtgggcttaccacttcttccaactaggagatgataccaggtttggaaaatggaaatcctactgaagagatacaaacagaatgtaattttaagttcaaaagagaaaggaccactctattctcagtcccactctgttgcattttagagaggagaaaacgaaataactaattgtcaaaagcaattaaataatttctacccaagtagggtgagaaacagtttaaggatctgatctggattctgtgggggaaaataaccaaagcctcatttgttaccattccctaatagaagcaagggaatctttagaaggcaaaggtatcctgaaaggtcaatctggggtggaaggacccaagctcacccaaggagaccaggttcctatagttctccagcattacatccctgtacaagactctctgagcaaggtccagttctctccattcttcctagtgaagttcacagccacatccttgaatgacataaagccctgaaacacctgcatggggttctgaagaaaaagttacatgaggcatacttaggggagactgatgggatggagaggaaatagattaaactatgttcacagtgtcaaagacaagattttattgactcgtatattaaagaatcttaaaatcttaaaatgtgtatacccctctgacataatttgatagttttgttttacagtaattttatatacagaactcaattataagaaaactatcggctgggtgcagtggctcacgcctgtaatcccagcactttgggaggccgaggtgggcagatcacgaggtcaggagatcgagaccatcctggctaacatggtgaaaccccatctctactataaatacaaaaaaaattagccaggcatggtggtgggcgcctgtagtcccagctattcgggaggctgaagcaggagaatggcgtgaacccgggaggcgaagcttgcagtgagccgagatcacgccattgcactccagcctgggcaacagaacgagactgtgtctcaaaaaaaaaaaaagaaaactatcagaaatatggagagttataaacaaagaatcacatctatttataccttacaatagaaaaatagcaaaatcgttctaaataacctaaatgtttgagaacagtgctacgagctgctaactgtccatgaaaatatgcctcctcctctcctttctaggtatacaaacatttcccaacctcctgtagttagacctggccatgagatcctaaccaatggaatgcaagcaggagtgatgtgcgccctttccaggcctgactcacgtatgttcctccatgctgttttccccttctgactggctggtagggccatgagccccagagtgagtttggaagccatatggtaaagaggctagagcttcaggtagctcaggtccctgaatggccatcctatcaatctatatacccactcacatggctatgacagcaaacaatacacttctattgtattaaggccatatatattttgggtctattggttacaacagttattagtaagccaacccaaactaattcagaaatcagcaccttcaagtgggagatatcataataaaaagttcaaatacacaggtggcattggattgacagtcaggtggcaagcttcaaagaaaagaatatttacgactggagaaatgcagactctcctttttttttttttttttgagacggagtctcactctgttgctggagtgcagtggccacgatgctctcggcttaccgcaacctccatctcccatgtttaagcgattctcctgcctcagcctcttgagtagctgggactacaggtgtgagccaccacgcccagctacttttttttgtatttttagtagaaacgggatctcaccatgttgtccaggctggtcacagactcctgacctcaggtgatccgcccacctcggcctcccaaagtgctgggattacaggcatgagccaccgcatccagccaacagatgcagactcttaatatacactggcaaactaattagcaactatgaggccagggcaaatgctcactgggcctgtggctctagaacaggttggaaagcaccagaacgctctttgtgtagaatgctcctggatatgtctggcgaacaaagaatgagttaagttcaggaaacaatgtgtcaattttcaagccaaaacaaaagagaatagagtgcagaaatctgaggcctcacgtggttggaaaagcaaactgtttctagatctcatacagtgggaagtaagtctaacaagagctttgagcaataaaggcccattacacctgttaactaaacaaagtgatttagccctgtaaaaaaaatgtcagattaaggatgtggccttcccacccaagcctattgtttagccggccttaaggttatcttcagttaagttgagagagacacatggtaagtaagaaactaagaaataggccaagctggccgggcgtggtggctcacgcctgtaatcccagcactttgggaggccgaggcgggcagatcacaaggtcaggagatcgagaccatcctggctaacacggtgaaaccctgtctctactaaaaatacaaaaaattagccgggcgcggtggcgggtgcctgtagtcccagctactcgggaggctgaggcaggagaatggagtgaacctgggaggcggagcttgcagtgagctgagatcgcgccactgcactccagcctgggcgagagagcgagactatgtctcaaaaaaaaaaaaaaagaaaaaaagaaataagccaagcttgagaattatatctaggaaagaactttgagtataagaagcctttaagtttttgtggaacaacacctctgtgatttcaatgtactgacttttttcctgtgccagaggaatcagtatcttgctttgattctaagtcatttatgtcactaactttctataaatctttcaagaatttactcagctttcagggcccacatcaaatctcactactttcattagcctaggagctgcttaaaaggactttaaaatgctagttgaatgaataaaaccttcctaaatctctctcagccagacacatttgctcctgctcctccaagtccatacagcattttccctaagacactttatattgagtaggcccttaataataaggccctatttaataataataaatctgctggtttgtgccacacagatttgtgtacatcttttctccccaaaatattctaagcagatgcaagcaagaaatgcctcacgtgcctttgcatatctatgccaaatgtctcaagtgaacaaaaagaagcttgattcttacccaaccatgttctaggagtcacgctcctcaattatctgctaaagaggcctcattcccatcctgcccctaccatcctttctctacactgccaactgatgggcgaggctaccaagcctcctgaccttcactgctactgccatacaactgaggaacacgcaaacaccatctcattggcagtccatcccacctgcttgatcctttcctttcaaactgctgtggctaatgtggttgacaagcttcatgctaagagaaaaaaaatttgcttcaggaattaaaataagatttctgagaagagaggaaaatccccaactcaattaaaataaaatttccaagaagagaggaaaatccccaactcacctgggactctgctgtccggcaaagagcagccatattttccttcttaagataccccttttgggaaagggcagggtcctcagagggcagaactggaaggaaattgacataaaggaacctggtttatctttatgtatctcaaacctatgaatttagaaacagccacttatgagaaaatgtgcctctgaccttggctgtccatagcttgaaggattttacagacatctatgtaatgagacttcaaagataatctcagaggatagaatgaacataaactcagggaaaggtatgaccattaactgggctcaggatctgcgtgagccactgctctgaaaacgaggttccctgggaccaaaaaaccctaaaacaaaacaagaagtgcaatgttacagttggagaggtgcttaaagacctccaggctcaactcctttattcgcaaatggagaaagtgaccaattttgtagaacaagaaaaagggagtcacagcagcaaaagacagcagtgcccaccccagcagtcatggtcacagacacctttagccaccccatcgtgagtattccaggcccacggtgagtctgtggccatctcaggcctgttaacaccacacacgctccactaaattgtatgtgtcgtatcattcaccactgcatcctaagcactgagcacggtgtacttggcagacagcagtccctaagtattgtgaatgaattaatgaatgagccctaaattcccttggtctgaattctatgcccaacaagcaaccttctgctcataatttacttctccattttgatttttttgcctgtagggagagaactgctgatgctattacctttgagcatttctttgcgcttatctctaggtagtagggttacatgctatttatcttattctacatatcattctatattttcctaatattttacagtttattatttcttcaatcctctctccacccatctccaaaaagcagtacttaaacctccttgtggatttgtttgggggaagaagtagttcttttaggcctcagttattaccaagtacagggtttcacaattttgtagaattcatgcctcctgtaatcctttgtcattggaactctggctctggagtctgcctgcctactgcctttacatcctggcactgtgtaaccatagccaagtttcttctgggcttcatttcctaattttacaaaagagaataataatggtacctacgttgctacaatgtgtgttaatgcacataaacggcccaaaccagtacctggtacagaataagcactcaggaaaggtcatttaatcatcagttaattattattctcaatattttctgcatatcaacattaaccaagactttatggcgctttctttctatactttgttttacgaggaaaaaaaggtatgatcaatatgtttggtcatactcccaaatcccaacttccccacaagatgcctgtcccctccctgtactggacactgacaatcagtcggggctaaggtagagttaggaactcctaagttccaggacttccagaaatcagagggcctgagggcaggatattataggaaagtcaaacagactagagatagactatggaagtcccttctaatttgggggatccctttgtatctccttaagacaaagcgctttttaagagaaaactgaaagagaaccaaggagcagtctctaattctgccagaaatgagcagcagggccatggaccctggggacgcaggccccagctctagccctgagctcatagaggttcaagggactagggctctcccatgtgctataatgccaaatcaaatcatcagcctctccatacctatttctttcttctcttccaaggagtccgacttatccccccttatccttcagaaaggcaggtggtataatggaaagagtacggaagtaaggtatcttcttttttcagagtttcaaattaaaagggaatattagtaaaatcaccaccattcttcgcacactcaccacgcaccaggtgctttccataaatcagtattcacagatgaggaaactgttaacttgcccaagttctctgtgctgcccacacacattttacaaggttgctgtaaagaaaaactaaaatgaggttgtgtgtgcatactgcagattcttggctaatggcaggaccctttatttctatttcttacctctgttctggagtttgcaggtccaatcctccataatcatagcctttgcttcactatttgggtgtagcaacctttccgttctccacgtatcttcctggaaattgccagcattctaccagaaactgtggtaagaggttctggattgaagttttcccctttttcattgtatttcttttttcattctctgagactctactcagaacgcagagtctgacgcagtatcttttgagctaaagctaaactcaagaacttcggcagccatttaatcttcaggaagccctgaacacaggcaagtctcagtacctttataccactagggccctgcagagtcagacactgggaacatagacagttacagacaacagtaaggatactgtgcctgatgaatacaaaagtgcagggtggtggaaagtgccctgctgggagtgcctggattctaatttccactatgtgctagttggctgggtgacctacaacaagctacttttcattcttgggtgtttccttcttacgtgcaaatgggcagatggatgcctactattaataaaagcaacaactgattgatcccttacttggtgtctggccctgtgtcaactgttgcatgtcaaaattccatttaatcctcacaaccaccacttaatagtaggtacaacaaacctcaaattacaggtaaagaacacgagacacagagagtaacctgcctacgctcacatcagagcaataccactctctgaaaatgtggataaacagatctctgatatccatcccctcctacgttcacacttcagtctatgaaacggttccaccacactgcaggctgcagagacataagggacgcgttggtgcctaacctggccctggtacaggagccttgggcgctacctgcctcactttgcaaccaaatgctccagggtatgcgggccctcagccggtttccaagcaaacgacccagaggtgtctcggataagaaacacacatacaccccactcccacacacacaaaacccaaagacacgctccaggggcagagggggcgcgtcaaggtggccgaaccctagctccagcagaaggaattacagtcagatcagcgggcccggggagagacccaaaagggagcagccgggaccccaagtctgacaatccactgctgaacacacacaccctgtccagcgtctgctcctccccggtccagacacagagagggtgtctgctctgggggacagggaggacacagactcgccacgcgcggagatcctccagagaaaggggccggaaacggaagtgcgcgccgaggctcctgggaaatgtagtccggagcggcccgggcgacagagcgagattctctctcaaaacaaaaacaaaacagaaaaactaaacaatgttaaaagtgaagttatagagcggaaatttttttttctttgagaccgagtctcgctctgtcgtcagactggagtgcagtggcgcgatctcggctcactgcaacctccgcctcccgggttcaagcgattctcctcctcagactcccgagtagctgggattacaggcgcccgccaccatgcccaactaatttttttaataattttagtagagaccagggtttcaccatattggctaggctgacctcgaactcctgacctcaggtgatccactcaccttggcctcccaaagtgctgggattacaggcgtcagccaccacgcctggcccaaaaattgtttcttatgcttgatctagtctgttgttagagtcttgattgtatttttcatttaattcattggattcttcagttctaagttttctgtgtggttcttttttatatctctgttaaattcctcattcaaattatgaattttcttgatttcattgaattgtgtaactgtatgctcttgaattccactgtttccttaagattattattttaaattctttttctggaactttgtatattttctttttttttttgagacagagtctcgttctgtcgcccaggctggagtgcagtggcgcaatcatctctaggcttactgcaagctctgcctcccgggttcacgccattctcctgcctcagcctcctgagtagctgggactacaggcgcccaccaccacacccagctaattttttttttttttttttgtatttttagtagagacagcatttcaccgtgttagccaggatggtcttgatctcctgacctcatgatctgcccgcctcagcctcccaaagtgccaggattacaggcgtgagccaccgcgcccagccagaactttgtattttttcttatgattggcatctgttactggaaattattgtgttcttctggaggtgttgtgctccttgctttttcatgtttcatgtgtttctacatctttctttctttctttctttctttctttctttctttctttctttctttctttttctttcttttctttcttttttttgacagagtcttgctctgtcagctggagtgcagtggtgagatcttggctcatggcaacctctgcctcccgcgttcaagggattctcctgccacagcctccggaatagctgagattacaggcatgtgctgccatgccaggctaatttttgtatttttagtagagacagggtttcaccattttggccaggctggtctggaactcctgaatgaactcaagctatctgcccatctcagcctcccaaagtgctgggattacaggcgtgagccaccgcacccagctctacactgatttatacacatatgatgaaacaatcacttcttccaatttcatggagtaggttctgtagggaaagatttattcatatgggtcttggggtgttgcttcaatggagtgtgttggcttttgttctaggtggatacagtagtgtattatctatgtaagtttcttcagcagtaatacatgctagtgatgggccgggcgtggtggctcactcctgtaatcccaatcctttgggaggctgaggcaggtggatcatgaagtcagaagttctagataagcctggccaagatggtgaaaccccatctctattaaaaatacaaaaattagccaggagcggtggcaggcacctgtaatcccagctacttgggaggctgaagcaggagaatcgctggaacccaggaggcagaggttgcagtgagccgagatcatgccactgcactctagcctaggtgacagagaaagactcggtctcaaaaaaaaaatgctagtgacatttgtgaatgtctcagtggcctaggctaagaggtggtgatggcggtcgtgtggcttttgcacagggctatttctcaagtcaggggctcatttgtgtacatggtgggtcagccaacttgaggtttggctcactggggttggggctatgggactgttaactctgggtggggacacgaatgcattgttgcttggctagcctacagggtgcctgccagtgatggcctgtggcactgtttctcagaccctggacacaggagcacagctgcttggctgtcctgggaacatgtcttctaggcgaagcctgtggagctgttatttaggcttgcaacaaaggcacaaagctgcttggctggccgggagatgtgtgtcctggagtggcccatgggactgtttctcaggcctgggatgtaggcacactgctcagctgacctggtcggggtgtctgcctggggcagcctgtgaagctgtttctcaggccctgaacatggacacatggcttctcagctggcctgggtgcatgtctgctaagcatggcccacagggtttttctcaggttcaggatgtgggctcatagcttcttggttggccaggagtggcctgaaagggtttttcaggctggcaatgtgggggtacagctactggatcagccttagagtgtgccttccaggggcaccctgtgggattgtttctcaggcctgggacgtggttggacagctggtcagccagcctgaagggcatgtctgcaggaagtgagccacaatgctgcatcataggccctgatcacgggtgtgggggctttgggtaggacaggggcatgtcaacaatgggagtgggtaccacagggttgtttctcaggctgtgggcacaggagtatagacattgtgctgatagggcagcatgtcagctgcttagtggctcaaggacatctcctgctttgtagagggtggtcagcagtttggctggctcaagagcatatttgccctgggtgggcttgccacatagttcctctgtctcaaagtgcagatggttggggtcgtcttctctgttgcacaggaccagaatcacagttgatcctaagcccaatctatgcatagtgggattatggagtttagccatccttgtgagatttgtagaaagaagatggagccctgatgccgcagaggtgcagtggctactgaccccataggatggtgcactccagaggtggctatagtctcaagatggcacagtgctgctgatgccacagcttgactcacagtgggtgagtggaggttgggagcacacactttctgttcctaatccagagcagtgtggtagcaagaatttcagacagctctcaaaactaggctcagggctttcaaggactgtggcattctcctgtagtaaggactgtgggtaaggcaatgggggctggtggagttgttctgcttacccttttcctgtaaggggaagtccctcctgtctccaggctgattgaagctgggtggagcagatggggctgcagaggctgggtaactctgcactgctctcctggatttccaatcacctcagctgcctctccactccctcactgcactccagtgctttcccttcaacatttcagtaaaattttagctgttttacctgtttattcatcgccttggtccttcctggataggaggagcgggagcaagatccatacatctctagtcagccatcttgctctatttccagctcttcctttgttataaactttccttaatctaaattaagaaattaacttttaacctaattatgaacagatattgaatgttatcaatgatttctattgagttagttatttggttttacttttccttaagaatccattaatgtagcaaatttcatatctagattttctgatgttaaaatcaacttgatcatgatataggttaaattcagttggctggccgggtgcagtggctcacgcctataatcccagcactttgggaggccaaggcaggtggatcacctgaggtcagggttcaagaccagcctgactaacgtggtaaaacccatctctactaaaaatagaaaaattagctgggaatagtggctggcgcctgtaatcccagctactcggaaggctgaggcaggagaattgcttgaatccgggaagcagcggttgcagtgagtcgagatcatgccattgcactccagcctgggtgacagagtgagactccgtctcaaaaaaaaaaaaaaaaaaaaaaaattcagttggctggccaggcgcagtggctcacacatgtaatcccagcactttgagaggccaaggcgggtggatcacaaggtcaggagatcaagaccatcgtggctaacacagtgaaaccccatctctactaaaaatacaaaaaaaaaaaaaaattagctgggcatagtggcaggcgcctgtagtcccagctactcaggaggctgaggcaggagaatggcatgaaccggggaggcagagcttgcagtgagcggagatcgtggcactgcactccagcctgggcaacagtatgagactccgtttcaaaagaaaaaaaaaaaagaggccgggcacggtggctcacgcctgtaatcccaccactttgggaggccgaggcaggcggatcaggaggtcaggagattgagaccatcctggctaacacggtgaaaccccgtctctactaaaaatacaaaaaattagccgggcgaggtggcgggcgcctgtagtcccagctactcgggaggctgaggcaggagaatggcatgaacctggggggcagagtctgcagtgagccgagagactccgtctcaaaaaaaaaaaagaaagaaaaattcagttgtcagttggctaatattttatttaggttttgtacttatgtccataagtaaaattggcttataattttcatttttattccttgtattatctttatccattttaagaaccaagtttatattaaattactaaaataaatctggccgctttatctctttttattcctctgagttgttttagaacaccttttatataagatagagaagatcagttcattgaaagtttggtagaatttggagtgtggccccatattttaatttcttttatggtaattgagctattgaagtttccaatttcattttgtacctttttatttctttcatattttcctaaacttatctacttcatctacgctttcaaatgtattggtgcttaataatgtccgttgtgcctctctttctgtttattcaatctacagttgtataacttcatctgctctcttaaattcatcattctcatttgaagtttgtgcatcttattaatctattcattaaaccaacttttatctttgtttgttttaagatggagtctcgctctgaagatggagtcttgctctgtcatccaggctggagtgcagttgcgtgatctcagttcactgcaacctctgcctcccaggtccaagcgattctcctgcttcagcctcctgtgtaactgggattacaggcatgtgccaccatgcccggctaatttttgtatttttagtagagatggggtttcaccatgttggtcaggctggtcttgaactcctgacctcaggtgatccacccacttcagcctcccaaagtgctgggattacaggtgtgagacaccatgtccagcccagcttttggtttcaatagtctttttattggtttttgtgtacatgacttccttgatttttgagcatttattatttctgtatttcgtattcctttggcttaacctgctccttgaataaacttcttagctcacttgtttccaatttttcttaaatgaatttaaattataaatattttctaaatactcttctagacgtactctaacatttctgaataacttgtgattcaggtttaagtattttgtaacttcttacactattttctctttaaccccaaatttacttagtattgtggggttttctttatttttgtttttaatattcagaaaaagttttagctctcttttctttttgatttctaattttattgcatatcttcaaagagcaatagatctgtgctgtccaaaatggcagccaatatagccatgtgtgtaccaagcacttgaagtgcgcctagtctgaattgagaagcattgtaagtgtaaaaaacacctccaaattatgaagacagtgcaaacaatataaagtatcttattgataagtttgatattgattacaagctaaaataaaatatattggacatgttgggttaaacaaatatgtttatgtaattaatttcacctcttttaaaagtttttaaaatagagtaactaggccgggcgcggtggctcacgcctgtaatcccagcactttgggaggccgagacgggcggatcatgagggcaggagatcgagaccatcctggctaacacagcgaaaccccgtctctaccaaaaaataaaaaaaattagccaggcgtggtggcgggtgcctgtagtcccagctactcgggaggctgaggcaggagaatggcaagaacctgggaggcggagcttgcagtgagccgagattgtgccactgcactccagcctgggtgacagagcgagactccgtctcaaaaaaaaaaaaaaaaaaaatagagcgactaaaaattaaaattacatatgtggcttacattatatttctctctatatatagtggtattgatgcatgtgaattattttaaatctcactgaagaatcatctgtattttagcatatggtcaacttccctgaataatgcatgcgtgctagaaaagaatgtatattctctgtttgttgcatgtaaagttgcatgtagacctattatcttgagattcataatcctgttattgaaactcctaaagctctccttccttttatcttcttgatatattggtttttcagaggattatgtaaaattttcctactatagttattgatttttctttcagtcgttataccttcttgatttcacattccttttataagtttataatgtgtccagacaaggtgttgtagatttatttttcctcgttccttcctgctgattactatgaacactagaaataacaaacaagaactcttgacaggtaggaaaaggaaattggactgggtagacagggaccccaggactggaggaacatcatgttagtggggcatcttataaccccaagcctagcaatagaagatggcccacgtagacttattcctccccctgtggaacaagggccccactaacaacaccaggtaggcctggagggattgattggaaaccccactaaccataagcagccagaggggatcccatcaggcctgagactctcctctcccatctagagcaacaggtggatgggcagtaccatcacaggggacctgccacagcaatcacaagcccaatcagacctgggaattcctattctcccaccccaaacacacagacacactctctctctcacacacacacacacacacacacatacacccctagagacaccaggtggttggttagtacaggcaggtggaaatcccaccatatagagatagaggactccacacaggaagcactctacttccatatggactgaagaatccctttccccaccttggcctagactgggcaacctctttccactcattcaggcaacaccaacagggatcagtagataacccagagcggaccaaaatagtgacacaaaggttctgaagactaaatagtcactggaagcacagcccaccacaaaaagtagaccaaggcctgtatactatatactaaacctaaataaatcttctaaaaaatgaaagatttaaatagaacccaaagtgtcttaatatccagaaatcaatccaaaattacccatcatcccaagaaataggaatatcacaacttgaaagacaaaagacaatcaactaatgcttatagtgagaagaatcagattctggaatcatcttgtcatgagggtttaaagcagccatcataaaaaacagtttcagtaagaaattacaaattttcttaaaactgatgaaaaaataaaaaatcttagcaaagaaatatgttataaaaaaagaaccaaaataaaattatgaaattaaaaatatacaattactaaaatatttaaaactcactggatgggcttgatagtagagtggagatgacaaataatagaaccagggaacttgaggagagatcactgtaatttacccaatctgaacaacaaaaagaaaatggactaaaaataaatgaacacagcctctggacctttctttgggacaatgacacaagatccaggaatcttaacatcagagtcccaggagagaaaaaaaagagtaggactgagaatatttaaagaaaaagcagaaaataatttcccaaatctggtttatgttccaaattatgaaagacatatacttacagattcaagaagctgaacaaaccccaaataaagtcaaataaattcctaccaagacacatcataattaaaatgctgcaaactaaagataaaacaactattaacagcagcagacagaaatgtttccattacatccaggggaacaccaatttgatgacaccaggtttcatgtttgaaatcatgaagtccagaaacaaataacacattctttaagtgctgtcaacttgaagaaaaaaagaaaaggaactgcaaactgtgaattgtatccagtgaaattatccttcaggaatgaagaggaaatccaatcattctcaaatgtatgtaaactacaagaatttgtcgctatcagatttagccttaaggaatggttaaaggaatttctctaaacaaaaagaatataataaatgaaagtatcatggagtatcaggaagcaaggaaggaacaatagaaaaagtaaaaataaggtcaaatacaataggtcatacctcttctcaaattttacaaaataatgtccattttttgtccattataatgtttttttaatcttgagtttaatttttttttttttttgagatggagtctcgctctgttgcctaggctggagtgcagtggtgcaatctcggctcactgcaacctccgcctcccaggttcaagcaattctcctgccttagcctcccaagtagctgggactacaggcacccaccaccacgcccagctaatttttgtatttttagtagaaatggggtttcactatgttggccaggctggtctcaaactcctgaccttgtgatcctcccacctcagcctctcaaagtgctgggattacagttgtgagccactgcacccaaccaaatttaattttattaataataacattgttatctggctattttttgttcatattagcctggtttatattttgtaataacttggattttaatatttttgttttgcttgaattccaatgtatgttttgaaaaaaaataatgctgcattttgttttttttacttattagtttttttgtttttttttttttgagacagagtctcgctctgtcaccaggctggagtgcagtggcaccatctcagctcactgcaacctccacctcccgggttcaagtgattctcctgcctcagcttcctgagtagctgggactacaggcgcccaccaccatgcctggctaatttttgtatttttagtagagacagggtttcactatgttggccaggatggtcttgatctcttgatcttgtgatccaccctcctcggcctcccaaagtgctggggttacaggtgtgagccaccgtgtctggccctacttactagtttttaatccaaatggagattctcagccttttgatagataagtttgacccatttacatttatcgtgataaattatattataggtcttattttgtgttttcttttctttttttgagacagggttgtgttttctcttttccatactttctgtttcttctattcctcttctctcagtttccatggaataatcacttcttttcatttttctttttttttttttttcttggagatggagtctcactctgttgcccaggctggagtgcagtggcatgatcttggctcactgcaacctctgcctcccaggttcaagtgattctcctatctcagccttccaagtagctgggattacaggcatgcaccaccatgcctggctagttttgcatttttagtagagacggggtttctgcatgttggtcaggctggtctcaaactcccaacctcaggtgatacacctgccttggcctcccaaagtgctgggattacaggcgtgagccatgcaccggccagtcactttgaatattttacatcctatttttattctcctggtgcttgtacctaatttattaaaacccacacctgtttcttccccacctcccatccattttttatggttgtgaacgtgtatttttttatgctgatcggcccagggtactatatacagcaaaactattttttttctttcttttcttttcttttttttttttttggagacagagtctcactctgttggccaggatggagtgcagtggcatgatctcagctcactgcaacctccgcctcccgggctcaagcaattctcctgcctcagcctcccgagtagctgggattacaggtgtgtgccaccacgcccggctaatttttgtatttttagtagagatggggtttcaccatgttggccaggctggtctcaaactcttgacctcaggtaatccgcctacctcggcctcccaaagtgctgggattacaggcgtgagccaccacacccagcctttttttttcttttgagatggagtctcgctctatctcccaggctggagtgcagtggcatgatcttggctctctgcagcctccccctcccaggttcaagcgattctcctgcctcagcctcctgagtagctgcgattacaggtgcatgccactatgcccagatagttttttttgttctgttttttgtttgtttattatcattattattattttgagacagagtctcactctgtcacccaggctggagtgcagtggcacaatccgggctcactgcaacctctgcctcccgggttcaagcaattctcctgcctcagcctcccgagtagctgggattacaggcatgtgccaccatgcctggctaatttttgtatttttagtagagacagggttttgccacgttggtcaggctgatcttaaactcctgaccttaagtgatccacccacctcagcctcccaaagtgctgggattatgtgagccactgcacctggccaatgttttcttttttgtatttttagtagagatggagtttcaccatattggccaggctggtcttgaactcgtgacctcaagtgatccacccaccttaacctcccaaaatgctgggattataggcgtgagccaccacacccggcctaaaaactgaaaatagaactaccatatgattcagcaatcccatgactgagtgtttatccaaaggaaaggaaatgagtatatcacagggatacctgcacttccatgtttattgcagccatattcacaatagcaacttaagtgtccatcaatggatgactggataaagaaaatgtgatatatatacataatgcaacactatttggccataataaaaaatgaaatactatcatttgcagcaagatggatgtaactgaaggtcatcatgttaagtgaaataagccaggcataaaaagacaagtactgcatgttctcagtcatatgtggcagccaataaagttcatcttatggaggtagagaatagaatgatgattaccagaggctgagaagggtgtggagggtgatgaaaaggggttgattaacaggtacaaacacacagttagatagaaagaataagttagaatctttaataacacagttaacaacaatatatcgtatattttaaaatcactagaaaagaacatttcaaatttccccaacacaaagaaatgataaatattgaaggtgatgaatatcccaaatgccctgacttgattattacatgtattttgcatgtatcaaaatatcacatgtaccccataaatatgtacaaatattatttatcaatattacattttcttcttgtaatcagtcctgctattgacaaatcagatttatttatgtaattattatttgttgagaagccacaaaatgccaggcactgttttttttttcacgtcgatacctttttttcttctcaacaatcaaaatacaaagttaaacacaattgagccattgttttggttatgcataatgtgtatgcctccaaaaacagaagaaaaataggaagaagtaccctcactaaaggttccctgactcgtcttccggcagatccaacgaagggagactcaggaaaatcacacttagaaagctgcccaatgaggtatttatgcaaaaagagtgttctggaattaagaacatacttttatattcctgtatttctcaaagagatcagaaaagtaaatcacacacattgaattttattattttctaaaagaggcctctgcccctttagaaaaatgaaatgaggggagacagcccacggtgggggttttaattggaagaagtcctcggccagaaacagtcctgaatgtttaacctctgcctttcaggagagaggtctgaattttatcatctggggggtgggatgaaggtcggggactgagctggaggtctttaggcttggtcaggtgacaacacaaatcaacgtgtcgctcagggtccatagctgctggatggcttttagggtgtcagatgtttagggagacggagggaacagagcactgcaaagatactttattcctatctactgggaaaaatatgctggaagtattcagcttcaggtcatgaattcgacctgctgtagaggtgtagggttttttttttgtttttttttttgagacggggtctcactctgtccccaggctggagtgcagtggcgcgatctcagctcactgcaagctctacctcccaggttcacgccactctcctgcctcagcctcctgagtagctgggactacaggcgcctgccaccacacccggctaatattttgtatttttagtagagacggggtttcaccgtgttagccaggatggtctcgatctcctgaccttgtgatccgcccgcctcagcctcccaaagtgctgggattacaggcatgagccactgcacccggctgaggtttaggttttttcaggttctctcaacagcaacccactggaaggtaagtgtggggaatgcaccagttagttcccactgtccaggctgatggagatctggcactacctggtactattccaggcactgtttttaacactgaggattttttttttaattgtgattgttttcttttgtaggtgatctatgttttgtttctggtaggctttagaatttcttcgttagatttcaccgtaatatgtggtgtcttttcataattttgtttgactctctatcaataatttcaatatgaagtctttaattttttatttttccataattcttgattatttcttaaaatagttcctcctctctgtttttctttccttatggattctcataaagtctagtcagcttccatactgcttaatatttctttcgtatttttcaactttttctcccttcctggtatcttctggaagtgtagagttccctagcctgatattgtagcttcactagaatattgtagatattcacttttcaattttacacattctgctatccaatctagtattaaccatcatattttgacacacagtttcgttgtttttatttttatgacaagttcttgcttgatatttcctgtctcctcctttatcattcttaggatagctttttaaaagtatgtgtacaggccacacacctcctaggaccgactgtagccatttgtcttcctgtgggtttcaaataaacttttcaatagttgctcaatccaacaatttccctcttccagacaattcccagattggattttgacaaagaagatcctgttttatgttagaaagtggaattagttaaattttcctgcataacaatatgaccacatactcagtggtccaaaatagcacatgtttattatctcatagtttctatgggtgagagtctgagcacagcttaagtgagtcctttgcagccagctatcaagatgtcaggcaagacagggttctcatgggaagactctacaaacaatgattcacttccaagcacacagagctgtccaaagggttcagctccttgcaggttgtgggaccaagggccttcggttcttgcaggctattggctggaggccatcctcagttccttgtcatatgggcctccccaacatcaccaccacttcatcaaagccagcaagagaggagtctcctagcaagacacacgttagacttttatgtcacctttattgcactgtattggttagaagcaagtcccagtccatacacaagaggggattgcacaaaggtgtaactaccaggtggctgagataatgggagttacaaatcccttctgggagctggaaatcatctttccttgaagtttctaaaagccactgaacggtttgaagcactaaagtaatagcatattcttgttttagaaagagcactagccagaaagtgtggagaacagattggtggtagagaaaaccttagttagggaatccagttaccaggctgcaacggcaatcctagtgaaatggtggtggccccaactaaggtaatgctactgagaatagagaaagatggaaacaattgagttatttaagatacaatgaataggacttggtgataaatagatggtgagatcaaagagttaagaatattcaggctctggtttgtgcaaatgagtgagtgggcagtaatgtcattcactgagaaaaggagggcagtctagacacgaagctggaggtggatgggttagtcctctaacagaattggagagactgaataactctcccttgaaagaaccaccttttatgatatgtttaaactaatgcttatgtctgcaaagaacctattgcttaaatttgttacaacaggttcaatcttttcaactcattttaaatacatgaattttaggattacaagtagtctgtggatacaggaacatctgactgagtgtacaaagagggacctgctcttcctaaaaacatccttcgtatgttttgaaagcaaaaggatgagttctgggcgcacaaaatatggataaaagctatgtattttaacgtatcttacaccggagtaatttgggttgaactcagcagccctaagcactgtgccgcaggaacttgtgcagacaaagcgcggggacggaccctgactccggtccgcgtctccgctgctccctccctcccttgctctgaggattagacacaggagatgctgcctcatactctcgcgagacggacggagctcttcgatcgtccgattctcccagccgcaccacgggtgctcccacctgcggagaaccggagtctggcgatgccaaggcgcttctgggaattgtagttccgggcgggatgagggcagcacgcctggctccgctccttcttacgcatgcgcgactccgagctggccaaagaagttcgtcccctttgtgaggcccgggatgggaggtgagttgcttgtggtgatgtcgctcgtctcggctcggcctcggcggtggttccccgggtcgttctgtgccgagtcggggctagagtgcgcgtttgttaaaggggcctcgagggcagaccatgagccctgtcccttctcactctggcctgatcctctcctcgggggacgcggttgtgccacgggcggggtggtcgcggggttctgggccagtgccccgagcgcggcagaatttgtccaaactcctgatgccccagcgtcacctcttccaggtgcccggttcccccagggacagcttcaagcggtagggacagacatctgaggacccagcctcagggatgctgtccccgggcttccaggctccagcgccgtaggactgaggcagactccacggtgagaaagagacccgatctaacccaggcctttcatcagagcccaggagggaaggcaggaagtgggaccacgaggcccggggggcttctaactcgtctggccagggagatctgaattggggtgaagagcagaatctccagaacaaggaggaggtggtgatcatggagacagatttggctgaaatgcctgagaaaggaggtgagaattgcggacgtgttgaacttgtagcgtggaaggacgaaattcctgctcctgaagggaaaacggttggctcaggggaggtggctcttggctggctgtctccattgtcttggggatggatgggctttttaagtgagactgaagggcttggtatgggagcaccgccctttccatggcagctgggcacacagtggacccttcaaagctacccccaaaatgtgagtgaaatgttaacttctatggcaagaattcacctctttggttgtcaaaaatgttttgttttacataggagaaaacaggcgtagtagttaatgactgacttccattctacctgaccagtttcatgaaggttgtgctgtgacctcctacaccagaattccccctggggtggttgttagatttctggattgtaccccaggctcaactaatgcttattactttgaggtggggtccagcaatctacattataaataagctttcagagtgagaaccaacgagtatagattaaactgggaaatttactgacatattctaatttctagatcagaggatgccatcttacagaatgtgttatgattatagcaactgaattcgagcccagagtagcaatattcccgcatatcccgggaagagggtcctgggaggaggtcggttgttttgggggtaccttcagtctcagtgtttgtaggcagcacatatagtatgttgaagtggtttttagactttaaatctgagtggcacgttaagcctaggtctcatcattactgctttcttgtcgttagctctgtcttcccaggattctccccatttccaagagaagagcacagaagagggagaagtggctgctctgcgcctcacggccagatcccaggtgagtgagtgctgattattggaattacaccttgtttcttagagtacagatgcactcccttctttgtgatgtggagtttctttatccactaaagcccatctgcagagctgagttctaaatctaagagactagtcaggagactaatggactcagaagaaaatgttttctacttataacactggatggatttcttccctatttagtgtttattgtccctcaacagataggtaagcagcatttccctttcttagcctcctatgctcatttctgtgcttggtaatgtgagaaactattttaaatataatgtggtacatacctcttaaaacttgtttctctagaggaaacagcatgtatgtgaccttaagtggcaatctaagaaagcacttaaatgctgaagtgattgtaaaaataataaatactcacatagttcaaagaaatactggaaaaggaaagcctatgaaggcgtaatttaaagagttacagttagaatccagccctctgagatgatgaaagctaaggtatgatcatgtctgcaacttacttttatattgttggcccctctctcccaaaaggtaaatatgacaaatattacgaatgtttggctgggcgtggtggctcatgcctgtaattccagcactttgggaggccaaggcaggtagatgactaggtgaggagattgagaccatccttgctaacacggtgaaaccccgtctctactaaaaacacaaaaaattagccaggcatggtggcacgcacctgtagtcccagctagtctggaggctggggcaggagaatcacttgaacctaggaggtggaggttgcagtaatccgagatcgcaccactgcattccagcctgggcaatgagggaaactctgtctcaaaaaaaaaaaaaaagaatttttgaatttaggcggtgattgtactatatcagtgattattgcattcatctttcaacttttgtatgtttgaaacttttattaaaagaagttagggctgggcacggtggctcatgcctgtaatcccagcactttgagaggctgaggcgggcagatcacctgaggtcaggagttcaagaccagcctgaccaacatggtgaaacctcgtctttacttaaaatacaaaaattagctgggcttggtggtgcgcacttgtaatcccagctactccggagactgaggcatgagaatcacttgaacccaggaggcagaggttgcagtgagcccagatagggctactgcactccagcctgggtgagagtgaaactgtctcaaaaaaaaaaaaaaaaagaagttgaggaggaaaaaaggagctttccatgatgtgtgtggcataccacaacccagagattcctcaatcagcctttctctttgcttctgtaatccaaggtgtaaaaagtagatactgcacgttcatagtgtttgtaaaagtcacttcctttatgtacttgcctgtctccattggcttctcaactgtcttacattagtcttgaagactttattagtcaagaagctttaagttgcagctgataaagtcaattcaaatgggtctaagtgaaaagaagtaactattgactaacaaactgaaaaatctaggtctggctacatatagggctcaaacaagaatgttaaaacctaattcttcattttactgaccttttctctccatgggttttatggccaaacaagtttttctcctagtgttggcctctaacgagtttaggcttacatcttcctgtgttgaaggccagagaaaaagggcagattctcttctagtcattcttgcagaagtgctgggattgactctaatggggtattaggcccattcctggatgagatattggccaaatttaagtgtaattctttatagaatatacctacacacacacgcacatacacatgcgcgtgcacgcacaaacatcccacccatgaatcagagatggcgtcagtactacctgagctacacagattcaaagtggccaggcatagtagctaggggaaaattagggcactggtaccagaagcgtgaatatatatttcaatactttgatatcagattcaacactgttaacagcatcaaggtgattgaacctattatggaaaatttttaaaactctctttgttctttgtgcattttattagattttaaaaatgcaatattggagctttttttcttgttagaatttgcctgggctattttttacctttgatttgttagatttttaaaaatattaaaagttttagttcttcaatgtaataaagtgaacaacacagacatacagaaatgtaaaggtaatgctacttccccctcaaattcagtccctgcctctctctactatgtatattttttcacattttttgttgtacttgcactactgtattcagacatatggtatactatatttccttccatctacctaccagtacccaacccagcaataatattttgtttggatggcctattctgtatataggatgtggctttttaaaaaaacctttttataagggaaatttgctcattcacatataatacatgtgtttcaaacttttattgccatgtgatttttataattctgtttcctgtgctttattgtttcctcttttgtagttttcctgctgtttgtgcaatggtttgcatttttgttgttctggctttttcttctaatttttgggcacttaatctccactgaatgtggatttagttatgtatatgcagattctaggctaaggttcatttttcctcataatgtcttttctacttaggggctacttagtgatttttacatattattttatcttaagggaataattctcttattattattattatttttttttttttgcttttccaactttatttagaaaaacaaatccaggtcccagtgccccctgtaccctccccgaccccagccataatttaaataacttagagacagagttggagggaggggacaggagaggttggggtcacggtggaaggaggaagagagcccactacagccgccgcagcgcccgcttcttgtccgtctttttcttggccgccagcttcttatcgcgctcgccagcatgcttcttggccatgggaccctcagcccctcccaggccccctggggccccagggtcggtggaggaagctgcagtgccactggccagggcccgcccggcttcggccctgccgctgggcccgccggcgcccccgtggatctctgtgagcagacgggcccgagccgcatactcctcggagttctccaagagcaggcggcccgcctcctcgttgagtgcagactcggggttagggtggatcagcaggcacctgatggtcagcagtacgtgtcggatgcccagctcagccgtccagtccctcttgagcacgttgacgcagatctcgccattggcgcccacgttcgggtggaagatcttggtcaggaagtagcccttgggtggggaggcagggaagtccttccccagcaggagtttcatgcggaacagacctccagcatatggggtcccttcagggccctcgatggtgacctggaggtcggtgaggtcctcctcgttgggaaagaccttgatgccatcgggtgggtctgcggtcagtgtcgtcacctccttgtacaccaggcggatgatgtgcgggggcagtttctccacgttggagttcatggctgcggccggccgggggcgggtccccccggcccccttcctgcgttcttcggtccgccggccggggcgggggcccaactgctgccgctgcggccctggagaggccccggcggccccgctccgctccccgctgcctctgacgtccgccgcgcacagcgtacaccaacctgcctccccggtgcccggcagcacttaattctcttatttcttaaatcttagattattttccgcatagtagctttactttgagataattttagacataagaagtgttgcaaatagcacaaagaacttgtatatgcttcacccagattttgcaaaaatttatattttactttgctttattattattttttcaaaatcaggacattcacattggcataatactataacctactgaccttattcagatttttccagctgtcttatttttctctttttaaaatttctgcttttatattgtaaatatttctcttttcctttgttttttgttctaacttgatttttgtgctctggtcatttatttacattttaaaaaaatgaaatggaagtgtttaaagctacaaaatttcctctgagtacagttttagccatgtggcattttttttcctattttatttcattattttcatattttgatatattttctcagttattataaattattccgttctatttttggaatgtattgaaatttactttgttactttttgcaaatgctacatgaatgtttaaacagtaggtgttttccatccagttagagcatttgattcatatttatttcagtaaccttgaaatattattcctgttgtctatgggtttacttaaaggtgcatgttcaatgcagatatgtatctatctccttatggtttttgtattttttgtcttatagaagtataatcttacgatattttatacctaaatatttatgaattgtatctcataaattggagccattttccaatttaatgctctttgccttgaattaattcatgtttaactggattggttttttgctgtcttttctttccgtgacttctccatttacaagttctgtattgcagttcgtcttgtgattggctagattgactcttcaattttttattgaggactcagagaagcattatgtagacgtgactttttttccctctgctgatattttactttaatcaaactacattgttgacttattggttcatattttaatactttattccccagaaaaattgtagtctctcaatggagaaaccagggtcatcttttggttctcatattgaatctagcataatatgcctggtacataattgatagttaccctttacataaaatactccgaatctgacgaccattagaatacttgtcatttatcatagtcagttcccctcttaagtgcatctcaggcttttgctccagggccagcagaaactgggggatgaaagagaagtaattaagggaaagatgttgaaaaaaatattttatgttttaggaaacagtgacattcaaggatgtggccatggactttacaccagaggagtgggggaagctggatcctgcacaaagggatgtgatgctggagaactataggaacctagtctcactttgtaagaatggattgtgattctggaatctgcttataggagcatcattactttaatgaaagtgaaatagcttaacaaagccttcacctttgcattcaggagtcaaaaagtgttaattctttttggcctgtgtagaaaatctgtttttgctctagattcttgatgaaatgtctgtgcttgttttgtatcagtattctttgggtttaagtgacagaaacttaactcacactcttaaaggggaaaaaaattttgatttttcagagatccaaatatattatcaagaatttcctttattcattgatttatttttaatcaattagcttggttttgctctgtattagctttattcctaggatttccccatgtggcaaagatggccagtggcagtcccagggttacgttattcttccagttagatagcaaagctaaaaaagaaaatgcttctttcctgggagtttcagcaaataaggtcacaggcccatcagtgaaacaatctctagagccagcgagattgagtactctgtggccagttttagatcctgggcttactagcatgcacgcatacacacatgcatgcatatgattgtatgaggggtggaggggactgttagcccctcccaaaccttatgtaaaaaaatcccctaagaaagtgacttctgaggccgggcgcggtggctcacgcctgtaatcccagcactttgggaggccgaggcgggtggatcacgaggtcaggagatcgagaccatcctggctaacacggtgaaaccccatctctactaaaaacacaaaaaattagccgggtgcggtggcgggcgcctgtagtcccagctactcgggaggctgaggcaggagaatggcatgaccccgggaggcggagcttgcagtgagccgagattgcgccactgcactccagcctttttgtaagactctgtctaaaaaaaaaaaaaaaattaaaaaagaaagtgacttctaataactgaagaaggaaaggaaaaacattagaagataaaacttcagttaccaccgttacagttatgtggtgctgccattgaggtcccgctttttcctcctttcctgaggtaaggactaatttgcaacatctctctgaagtttcctcacacaataaggaaataaagagaaattcctttcttttctgacagttgaaaatatttgtattttccaaatccaattgaactccttaccaggcccagactcttgctgcagatatttaagcttcatttagaggtccaccctcccttacttcagctcttcctgtaatactttgtagatcaagaggttgagaccatattccggtttagatctttatacccattacaaataactaagtccagcaggacggtggccatgaaagttggtcgtggtggctcacacctgtaatcccagcacttagggaggcagaggtgggaggatagcttgagccccggagttcgagacctgcctgggcaatatagtgagatcccattaactttaaaaataaaaaataaaaagtaaatttttataaattaaaaaaaaagaaagaaagttggaattcactaaggaatatgtaacaattcaactggcttgaagaaaacttccacaaataacttactcccattactttcttctttctgtctttttctttttttaaatgaatagggcttccagtttccaaacctgagagctacaacttggagaatggaaaagaaccattgaagcttgagagaaaagcccccaaaagcagctattcaggtgagccagatagatgggagtcttcataaatgatagcccagcaggacaatgaagaaatacttttcagtgcttaagaaagtgcctgtgtgcccttatttttaaatttttttaaaattctaaagcatttaaaatatatacagaagtccagaaaataaaataacattcatgtatccatcactgagattagacacgtactaatattttgcttcgtttgcctcttttctttcttcctttctttttcttacaatataaaactaataattatacagttggatgaattttcactaatttagcacattcatgtaacgattgcccaaatcaagaaaatagccttaccagcgcctctagaagcaccggtgtgccctgtttcaggaccctcccttctcccaagggtcaccttatcctaacttatagcaccaagttttgacggttcttgaactttctataaatggaatcatattgtatatactcttgtgtctggcttccttcactgcacattagctgtgagatacatctttgttgctgcatatcatcataatttattcattatcattgtataattttttgttttgttaatatacccagtttattcttctgaagatgagtatttggatagtttccagtttttagctgtctgaataatgccactatgtacactttttaaatgccttttggtgaacaaatatatgcatttcttctggatatatacatacaagtagacttgttttatcagaggatagatacatactcacttttggtagatagtgccaaagaggtttctagagtcattgtaccaattacattcctagcagcagagtatgtgcgttctagttgttccacatgcttgtcaacacttaatattgcttgttttcattttagccatccttttgaggtgtgtgatgtcttttattttttaagaaataaaaatattacatattcagttaaagcccttttattctcagctgggtgtggtgactcacgcctgtaatcccagcacttcgggaggccaaggtgggtggatcacctgaggtcagaaatttgagaccagcctggccaacatggtgaaaccccgtctctactacaaatacaaaaaaattagccgggcatggtgacaggcacctgtaatcctagctacttgggaggctgaggcaggagaattgcttgaacccaggaggcagaggttgcagtgagccgagatcatgccattgcactccagcctgggtgacagagggagactgtgtctcaaaaaaaaaacaaaaagcaaagaaaagaaacccttttattctctttctcccctagaagtaaccattatatcttgaaattggtgtgaatcatttcggtgtttttgtatgtgtgtgtatacacagagatatatacatatgtatgtaaaacaatctgtatgttttattgttacactttttcttatgtagtctgatttcttaaagttcacattgtatttcgatattaatctatgttaatatatatgaattatgttattcattttaactactgtggagtcataagtccactgtatgaataaactgaacagtttattttttttctgttagcagttgcagtgatcatcctttttttgattccttatgttcatcttgagagctggtttagggagataactggaagaagaattagtaggtcttaaatcatcacatgtttagctttactaggaactgccaacagttgagttatcagacttgttaatttttgtcaatctgacggatgcaaaatgatgttttaaaattttcatttctctgagtgataaatacaagtttgagcatttcatgttacttggctattcaagtttcttgtgagttacctgttgataccctttgcctgttttttgagattgggctgtttatatcttttctcttgatttggtggagttcttcatatattttaggtactaatctatgacagaagtagcattgcaagtcagtgagaagaaattggttcttctaatctttggcttattttattttctggtgtgttaggcatatagaattaaacatttttaataacaaactttttttttaaatagtgctttttgtgaattgtctatctactttatcccagtgtcagaaagattattttattccaaaatgttcaattttgttttacaggtatttatttttgtatatgatgaaatgggaaaactaattttgtctttttccatgctgaaagccaataagtccagcattgttcatggaataatcttatgttactgatttgtaatgctacctgtggtaaacccagttcctcagcatacttagttctatttcttgtctctctggtttacttgtctgtctatgtctaataccagactgttttatttactatacttagtattatatatagctcataaagaaaatccttcctggatattattatttttaaaaaagttatacttttgaatattgaaagagtttaaaaatctttccgtgattatggatatatctgtttcaccccagagacctattagtttctgtgacttacccactcaccacccatctcccttttttggggtattgcagttttcatagtgatctgttaagaggtccttatatatgaggtttttaccttttcttatgttacagatattttttctagtttttgactttcagttttgctatgcattttgatgtacaagtttaattttttttttttttgacggagtcttgctctgtctctcaggctggagtgcagtggcacgatcttggctcactgcggcctccacctcctaggttcaagcaattctcctgcctcagcctcccgagtagctgggattacaggcatacgccaccaaacccggctaatttttttttatttttagtagagatgaggtttcaccgtgttagccagggtggtctcgatctcctgacctcatgatccgcccgcctaggcctcccaaagtgctgggattacaggcgtgagccactgcgcccggccctcaagtttaattttttataatctttttttttctgccttttcagtgctgcttaaaatgtgtttcattaatccaaggttacatatatatttgcctctgtttactagtatattctttaattttttctttagattcttaatccatttggaattgcttcttacttctctgagtgtatcttcttagccttcttttttgaacaattaaatattctaattactcaaaatttgattttaatctcccttccttttgtatacctggagtcataaacttgagtacttacatgggccaggaggtaataacactgagttaagcaagcaaggtggaaactggtgaaccagaggagtacaggcctcaactgaaaggagtggctctagctcaagggctggcaagctttttatgtaaatggctagacaataaataattaccctttgtgggacatggtgtctctgcagccattcgatcttccacagtagtatgaaagcagccctagaaaatgcatacatgaatgggtatgttccagtaaaaaattatttagcaaagtaggcagcaggctgtagttgccaatccctgctctaaatggtggttgttgttcagtacgcttccagtttttttcaagagagaaactctaaatttgcatttatctgtaatctgccccccccccggcttttttttttttttttgagatggagtctcgctctattgcccaggctggagtgcagtggtgcgatcttggctcactgcaagctctgcctcctgggttcacgccattctcctgcctcggcctcctgagtagctgggactacaggtgcccgccaccacacccggctaatttttttgtatttttagtagagatggggtttcaccgtgttagccgggatgatctcagtctcctgacctcatgatccgccctccttggcctcccaaagtgctgggattacaggcgtgagccactgcgtccagcaataatctccctatttttaactgtgtataactagttttaaaagtttgtataaaaagtgtggcccagagaaaatgtgtctaaggtctgatttggccaactgatcaactgtttgcagcctctacttactacttcattagtctcatcattcccacaaccagttaccttctatcaagatgagtcccaaattggtatttccatcctagagctctcctcagggctgttctcaacatcttaactatttgattcctttgtttgcttatgtcaaagatacttcaatacaacatgtttaaaactgaatgtctaaaataagtctaaatttcccatctccccaacagcatccttttccagtaattgttttaatggtacttactgtcatcaaattgtacgtggtggaaatctacgcacagtctttacatcaccccctctctcctttatccaattaatcactgtatttacctaattatattctaagtatttcttcactgttaattttccttcatatattttttgttttcctggattactgtgataatctttgtgattccgcctttgccctcatatacttcattctcaacattgtagtgagactgatattttcataatcaaatctcatcttgtcatcactctgcttggaacatttgaatggcttctcgctgccttcacggtaacagacaaaatcctggaggtctacaaaatcttgtgaaatctggcttttactcattatcccaacctcatttcacagctactcttcttccatctctgtgctctagtgtagcagttctgaatgctttggcatcagaggacctactgtaactataaaaattgttaaagaccctaaagatgtttgatttatgtaggttacatctaccaatagttactatactacaagttaaaacagaaaaattttaagctattagctaattcatttaaaaataattggccgggtgtggtggtccacacttgtaatcccagtgccttgggaggccaaggtgggtgggttgattgagcccaggagttagagaccagcctgagcaataaagtgagaccccatctcttaaaagaaaaatagaaataaaaaattataaacatgtcgtgttagcacagtatatttttttgttaaaaaacatctattttctttaaccaaaaaatgttattaagaagtatggcattgttttacacttttgccaatctctttaatgtatgacattatagaaggtagctatattcttacaactgcttctgaatgcaacttgatatgacatgttgttttggttgccatgcatggagaaaatccagcatcacacagatacaagttggaaaaggaaggagtattttatagtcttttcaggtaattatggctattcttctttgaaacagctccaaaactgaacaagtgatactttctgaaagattaggtacaatgtagaatctgaaaccacatccataaatttttcatatattgaaatctatcaatcttttggacaatattggttcactaagtgcagatcttctttgttgacactttatattgtgcaatatttttgaatattataacttttagtatcacaactgaccttatcagaaaagcctttaagttttaggaagccatcaagctctcggtggtaaatagaagttttccaaaacttgtaatttctgcctgaaagctcaaattttataaaaaactcatttgttgtccttgatatgacaggttcactttgttcatttttgagaaactgtctgccagatacccaagttagataacatagtttgccattcagtcatcctttcaggtaaaatggtggtctgtgaaacaagtggctggttcagctcacaactcaaatgattgcatggtatatttcctcaagatgaccattgttctttggtataaacagaattgctttacgaatatttcctatttcattaaccctgaatattaaaaaggcacttcaaggattaaaattcaatgaaattaatgtttatgcttccttagacatttttgaataaaactggctttttttttttttttaaaccaagagtacatgatggggaagaatacaaggactactagtaagtttagtatcattgtgttgatttgtgcgaagttgtaagcaattttaccattacttttacaacatcatggaaaatgttgagacaatgaaaaaggcaaataacatctaaatgttattttggaagcagttttgaacttatagtttcccagggattcatggaccatacttgaggatctttacctctacctacctatacaagccttatgtcaatttatgttttatttatttaacaagcacttaatgtagcacttatgctgtgtcagagttttaaatgcttcatagatatttgcattaatgctcattaaggtagctattgctatcattccttgcaagatggatactgttattgccctctcttacacataaggaaaccgaagtaaagaggttaaataacttatccagtatcacacagctagtaagtggcaaaactgcaattcagattttgctcgtgaatgttagattaaattttctcttcctctatatgtatagtgactgttttttcccagtgactagttcagagcctagcacatggaggatattctataaatatttgttgaaaaaaatggatagaagatgaatagatagatgaatgaatataatttatttgagtgtatgaaatgagtgactcatctaacttaattttcttctaatagttaatcagttgccatggcatcattggaaaaacaaatctatgttttgttcactgactgaaataccaccttcatattatctttaattcttacatatactttatttctgtatttgctcttctattttactcctgtttatttctttgaactacagtgcttaaaatattttctctatataaattagctttatattggatataaaaattctactatatttatattagatatatttagagaggttaagcttccatctctgccctctctcccatgttctgatgttttccctataggtacaaatttttattggttttccatttatcctttttttatttttttttaaatgtaagcaaacagtataggtatttgtaccccttttttttctttataaaaaagtagcaaactgtgtgtgcttatttatagcttgctttttccttttaaacttaatatatcctggtggtcaccttatagcaatatgtaaagatctttgttattttttcaggagatggatagtactccattgtttgtatccactatatgttcaatcatttctgtatagtaggatatgtgaaatgttatcagtcttttgctacctgaattagtgcttcaacaaatagccttatgcatatatcatttcatatatttgtcattatgcctttgggagatcataggaggtttttgatcagcaaaatgttataaaagcattgttaggaagattaaactggcaatggaatacatatttggatgtgagtaggattggaatagtgaaaatttagaagccataactgtactgtacattaagatggttatgtgcctagaaatttattacaataagtaggtattctataaaaagttatttcttcccatcctgatctgtgtactcattgtctgctcatctgtggatatattgcttcattggcatctctactcttatattttttgtcatctttctcctcttccgactctcctggataggatgtacttattttctctgcatagtctgagcatttgtttccctccatttgtttctctttgcaaatcatctgaaagagtcaaatccacttgctccttgaaggcatgcttttcactttcattaactcttacctattacagaactgcctttttgttgagcacagaaaacgaaggaaatttgcatttccaatgtctttcagacatggagactagaccacagagcaaggattcaacttcagtgcaagatttttccaaagcagaatcatgcaaagttgcaataatagacagactgacacggaatagtgtctatgactctaacttggaagcagcccttgaatgtgaaaattggttagagaatcagcaaggaaatcaggagagacatttgagagaaatgttcactcacatgaattcactctctgaggaaacagaccataagcatgatgtatactggaaaagcttcaatcagaaatctgtccttatcactgaagacagagttcccaaaggatcttatgccttccatacacttgaaaaaagcttgaaacaaaaatcaaacttaatgaaaaagcagagaacttataaagagaaaaaacctcataaatgtaatgattgtggtgaactcttcacctaccattcagtgcttattcgacaccagagagtccatactggagagaaaccctatacctgcaatgaatgtgggaaatcttttagccacagagctaatttaactaaacaccagagaactcatactagaattctctttgaatgcagtgaatgcaagaaaaccttcacagaaagctcatcccttgcaacacatcagagaattcacgttggagagagaccttatgaatgcaatgaatgtgggaaaggttttaatcgaagtacacatcttgtgcagcatcagttgattcatactggagtgaagccttatgaatgtaatgaatgtgataaagcttttattcattcatcagcactcattaaacatcaaagaactcatactggagagaaaccttataaatgtcaagaatgtgggaaagcctttagccattgctcatccctaactaagcatcagagagttcatactggagaaaagccatatgaatgcagtgaatgtggaaaaacttttagtcagagcacacatcttgttcaacatcagagaattcacactggagagaaaccctatgagtgtaatgaatgtgggaaaaccttcagccggagctccaattttgctaaacatcaaagaattcatattggaaagaaaccgtacaaatgtagcgagtgtggaaaagccttcattcattcatcagctctcattcaacatcagagaactcataccggagagaaaccctttagatgtaatgagtgtgggaaaagctttaagtgcagttcatctctcatcagacatcaaagagttcacactgaagagcaaccctgaaaaattactgaatgtgaagaaatgtaagttggttttatcactgtattaaatacttgagtgtttaggtggaaggcgcatccataatatgcatgtgaggaccaattctgtatgcatctaatttcatttgcgtaatacatagttttgagccataagcaggttctttatgtccgttaatttgataattatgaaatctagccagcgatttcaaaattttaatctccaacgtcccaaatagctatctgtggaaattcaagaagtccctgagagtaggtagcagtacgaacattgtgaaatccagttttcccctctcttgtttatgtcagagctttgttgtaagcctctcactttgtaaggaaattcttattgggtaggttaggctgagggcttacatccttatcatcaggaagacacaatgttgttatttattactccttgagatctagatacacatatggtataattcatctagagtgtaatttcttttatattagccttaaaaaccaaaaatgctgggttcaaagtccttagaattcccttcctccctcaacaagctgctgtctatgttgatgaccataactgggatgtataatatttacagacaactctaagttacgttcacatggattatgtacatcattgatttttttttttttttttttttgagacagagtcttgctctgttgcccgggctggagtgcagtggcgcgatctcggctcactgcaacctccacctcccaggttcatgccattctcttgtctcagcctcccaagtagctgggactacaggcacctgccagtacgcctggctaattttttttgtatttttagtagagatggggtttcaccatgttagccaggatggtcttgatctcctgacctcgtgatctgcctgcctcggcctcccaaagtgctgggattacaggcatgagccaccatgcctggcatcatcattgatttatgtcattgttatccctctaccgcggagaccttctttcattttccatttccctgggagttcacgtgaagtagtgaatgggtcaaaatcttaacagtggttgttgatcaagtccttcctttcttatccttggcactgaataaatctttggttttccataatcaaagggtgagggagacttcttttgtctacattattcagctttctgaaagctatgctgtgtccatttgagaaaaagccccagggatattgaaggtctgagaagttgagtggttcagtgtgttattatatttagggtcccagtaaagaagaactgaagcaactgtgagacaccagggcatacttccctgtatgagtggaaaacaaggcacggaaaatagctcacaggatagtcctcaactgacttgcttgaggataagcagcttcccttcgtgaagaagttgccatttctctggccttcatatttatctactttttgttattgttgtctgtatcggttcaatctcacactgctataaagaaatgcctgagactgggtaacttataaagaaaaaaggtttaattggctcatggttccatgggctgtacaggaagtatgactggggaggtctcagggagcttttactcatggcaaaaggcaaagccagagcaggtatcttcacagggctagagcaagaggaaaagagagaggggaggtgctacacactttttatgcaaccaaatctcatgagaactctatcacgagacagcagtagggggacagtgctaaatcattcatgagaaactacctgcgtggtccagtcaccttgcaccaggccccacctcccacattggggattacaattaaacatgagatttgggtggggatacagatctaaactgtatcattactcaaaaaaaaaaaaaaaaagaaagaaaagaaaacacaggaaaaggaactcacctcttttatcatcttagtatttagtactaatggtttagagcaggaattgacaaactgtggcctggactcatggaccaactctggcccaccacctgtttctcagaagaaaattttattggaactcagccacacttactcatttacatgttgtccttgactgcctttgtgtccagtgtcagaactgagtagctgcagcggaggttgtgcctctgggctttaatatcacaaacagagcagcttataagcaacagaaacttacttctcacagttttggaggctgggaagtccaagatcaaggtgtcaacatatttagggtctagggaaggtctgcttcttggttaatagaaagcacctttcactgtgtcttcacatggtagaaggggagagctctggtatcttcagccccttataagggcactaatcccattcatgagagctccaccctcacgacctaatcacctccaaaaggccccatttcgtaataccgtcagttaagtttcattatatgactttgatggggatatagcccatagtaggttgtatgtccctgaaagcctaaaatatttactgtttggctctttacagaaaatattttcttggcccctgttccagagcattcatcaagtcagataaagggtttaaaccagtcagagaaactaggtggaatggaaaagtactgagagataattggggacagaaaaataaaagagatgggaaatgctgcatcaaaatactcctacctctaggatgttactatatattgttaggagaattcaagttattgaaacttgccaaattcttgagtgaagaggaattcatttgagagccaaaatttgactaaggaaagaagaccaacatgggctttccaaagttgagtttgaattctgccatccccactaagcagtcatgtgaccttggaaaaactccctactctgagtctcagtttctttatctgtattaggtttcaacaaagggaataaatcattggcttctcatgaggttgtcataaggattaaataagacaatgcatataaaagaactggcagacaataaatatagagtcccccactcctgcttggtgctctctttctctctccttctctacatagagaagtgccagagcatccgtcagtagaagttacttaaggttggctgtgtcttccacatcttttgtttacccatgaagaactgtgaccatcttgttctgtgtcttgtcataaagatgggacgtgacttctttctgctcttgcttccatctggtgctgttttctgcacagcctccttgagaccttccagaaccttcttttttcctacttcatatcacttaaccagtagctatctgggatggttccagaggctgaagtttgcagttgaataacattttaaatagtgttaagcgacttgggatctctggccctttgcgtttcagtatttgtcctttttatgcctgatgtttaacctgccacatgtttgtactgcaacatgaatcttggaaattttaatgttatgcatttcaaatgtttttggttatctgtaaactaaatgtgcccttattggctcacttgtcaataaagatgtttgtatatgtattgtcagaaacttttgtaaattgcttttaaattcttccttttttaaagcatattttaagatgtaatgaaggaccaaccaaaaaatatctccatatcattcaggataccaatcccatttctagctggtcatctggcttcacaacttctggagagatgggatgggagataccgtcagcaacccaagtatctgcaagaaggttaaggagtagaggaagatagtttctaacaagtagtactgagtccccaggccaggtataggcactactcagtagggctaattggggtgaaagggagggaataacttcgtataaaaagcacagttaaaattaggcaaaatgggccaggtgcggtggttcaagcctgtaatcccagcactttgggaggctgagggaggcagatcacctgaggtcaggagctcgagaccagcctgaccaacatggagaaaccccatctctactaaaaatacaaaattagccaggcatggtgacacatggctgtaatcccagctactcgggaggctgagtcaggagaatcacttgaacccgggaggcagaggttgcagtgagccaagatagtgccattgcactccagcctggacaacaagagcgaaactccatctcaaaaaaaaaaaaaaaaaaaattaggtaaaatgtcataaaaatcttattttgtgtaacttttcaattatatctggtttgggggaagacaatgtaatatcacccaaaagtataaaagtgataatgtaagaatactaaatattcaaattgattggcaattaactagatcaattatctattgaaaatttgtcatagtttttattttcttagatgtgttctcacttttaaaaatatgtgtttatcggttgggcgcggtggctcacgcctgtaatcccagcactttgggaggctgaggcgggtggatcatgaggtcaagagatcgagaccatcctggccaacatggtgaaaccctgtctctactaaacatacaaaaattagctgggcgtggtggctactagggaggctgaggcaggagaatcgcttgaacccaggagatgcaggttgcagtgagccgagattgagtcactgcactccagcctgatgacagaccaagactctgtctcaaaaaaaaaaaatgtgtttatcagaagatgactcaagttggaagcctgctttcttcccttccttgtgtaattctttctgggccccaactaggcagtcttgggacccatagccatatgagctgtccctctccataagtttcattgacaaggtagaaggctattccctgtagtaatatatataaaatgtggcatctggtcctactgtgtagtttccacttataaacctcaaaaaattagatgtttttactgaattgttttttatttttttcatgatgtaacctctgtttataaatcccttagattgagtgaactatacaaaaaaggtgcatgcttcacctccctcccactcccaccaattcatgaaacacgtaatcatcatgtcagcaaagttcacatatctggggcaatccatggagtcaaactagagataaatgctttgctattaatagatcgaggactgtccgcctccatctctgctctggcttcctctctgttggatgtgcttttcttagtctcttgcagcgacaaatagcctactggcacttggaagttatattacggttcttggcattcacaattccaaggaaagtacctctttccaaatagctccagcaaaatccctgaggctacttctccactttgcttgagtcgtgctgatcactgaaccttttataataccaccctggaaatggggtcctctcatcgaccaggcttgagtctgtgtaaaaccctggaggaagagagggtggagtccatcccattgatgcaacttgcactgtgggtggggacagggtgcttccctcaaataaatccaaagatgctgtgcaggtaaaacaaacactgctattggaagttaacttcagcatgaataagactatctggcctcctgctccccatctattcccccccacaagagcagtttttcaaagatcaaacagtgataacattgacagaagtttaaaacctaagaaagttgggtgcagtagctcatgcctgtaatctcagcactttgggaggccaaggcggacagatcacgaggtcaggagattgagaccatcctggcaacacggtgaaaccccgtctctactaaaaataacaaaaaaattagccaggcatggtggcgggcgcctgtagtcccagctactcgggaggctgaggcaggagaatgacgtgaacctgggaggcagagcttgcagtgagccaagatcgtgccactgcactccagactgggtgacacagcgagactccatctcaaaaaaaaaaaaaaaaaaaaaaactaagaaagtatttccaacattgatttcatagagtttctgtgagggttatgtgaaattatatatgtgaaagggctttgttgcacattgctgagttatattttgatgataattttctattctttgagaccaggctctagtatacaaaaagcatggacctctcaccagggtgccatttcttaatgctaacttgtgctacctgtcctttgtggcctggcagggaatctttgctcatcagtagtcacttagggacccgagatggtatagggcagccaccaccataaatattacttttgccatatcaaaaacatagttttatgtatggttgattcaattcccagtctcgtgacctatgcatctcatgttgtagtgactcaaacctgctgggttatccaggactgtaattttttttttttttttttttttgagacagagtctcgctctgtcacccaggctggagtgcagtggcgcgatcttggctcactgcaagctccacctcccaggttcatgctattctcctgcctcagcctcccaagtaactgtgactacaggcgcccgccaccacgcctggctgattttttgcatttttagtagagatggggtttcaccgtgctagccaggatggtctcgatctcctgacttcgtgatccgcccgcctaagcctcccaaagtgctgggattacaggcgtgagccaccacgcccggcccaggactataatttttaaaaacccatggtgagatctggcttcagatatgactggattcagatattcagaagatgtcatcagctcattctcttgctatctcagcaccatttaattccatctgaatttataattaacgctttataatttattataataactatcagaatgaaggagagtaaaatcctttattggagtataagacatgattatttcaaagaggagttgatcagtgttcccctgagagtaagaatgcattatatacagtgtggacatctccagggccttccaaacataagtaagtatacagtttctgaaacatttgttttagtaacatatctatacaaaattaaactagggaaggtttcccttctctttggtctgacacctcttcccataaacagagcagctcttacaatcattttgaactaattaataactataggacataccaaacaaacccaagtatttcttacattttcctgtttatgaatgccatatcataagctccaagataagggtctgttttggctttgttcatatatatatatatatatatatatatatatatatatatatatatatatataaaatgaaaagcataacacagaacaaagcacaaaactgtagttctgatgagagacaatttctactattgggcagattacacagaaggtaaagaatgatctttccctttctcttgttgaacaaactatcatttaagcaaagataaccgaagtttaatctttttaaatataatattttgaattaaagatttatagattttaatgaactcatcaaaatcaagccaacttttgtcaaaattttaatacattttatttcttcttttcagaattcgcagctattataaagcacaagtaaagttcactttcccccaaaccttccaaaacttacagcatcctctccagttttatgctttaactatcttttgcattctgcaacaaccacacatttcactctaagagaaaaatagtcctgttttcttttgataaacaaaaacataacattttctttctacatgtttagggatccccaagaccacccccaggttcaatgattcactagaaggattcccaggactcagcatgttgtcattttcttggctgtggtttattatagtaaaaggacacacagcaaaaccagtaaagagaaaaggctcatggggcggcaaggtctggaggaaacaaggaacaagcttccccgagtcccctcccagcgaagtcacacaagacttgctcatttcccacagcaaggagttgtgacagcatgtgtgaaatgtgatctatcagggaagctcagtagagattcaaatcctaaggtttgtactgggtgctagtcacataggcagtctctgtctagcatgtaccaaaactccagacttccagaaggaaagcaggtgttcagcataagcttcattgtttttacagacagtttaggagcagtgatccactttaattctggaattagcgggaacgatcccaaagttatccttcccagatgcccgcctgtggccaacctcgtaggcaagtctttctaaagatagcaggctcggacttgctatgttaacttttctgcacagtttcgttgccgctattgttttcatacagcctcccagccactcatattaatcacaaatttgctaaccaaagaaattaactgggatgtagataatcagaactctctacattagacaggcaacttagcagatgagcaaaactcacaaacacacataaaatgacctcctgcagccacacatcccttttataccttcttagcacacacatttcctagctctgtctactgaaacgggctaaaagcaatgacatctcagttgcaatgagcccagatcttggtttctgataccgttctctgctaaaaggaactaaggctcctcagaaaaatggctgattgcaggtctgagggaaggaaactccaagaagatcctggaacatcttattccagaaaaaaaaaaaagtagcactcaaaaaaatgatgagggtaggtcacaaagacacaggaagtagccctcactgactaaatccggaacaatttgagcagcaaaacaagaaaatgatgaattgtaaaccattgaagaagtagtagtccatgagttcacattgataataagtaaataaatgagcgataacagaggacacttgcttaccgcagaatatcctatgccaatgggtaaatgcgaagggaatgttggagctggaaaactatcattttgtagccataacagtaaagactgattcaagcaagaatcaatggatgctaaatctaaggggaaattttgatgaggaacaggatatttgcatagaattgaagtatcttttccagagattgcttgttatgattagcaattgcaaggcaaaaaataattatatagtggaagaactggcaaaaactttgattacatgatcaaaattaatatgagtaagcagcacatggccattctgtgcctcagatgtgataccatgagaaggacacagcataatgtgtgtactattctggctgggaatgcataatgggaatctaatcatgaggaaatatttgacaaactccaaaatgaggactattaaaaggactgcattcttcaaaaatattaatgtcacataagacaaggaaaagctgaataacttccaaattaaaagagactaaagcatcatgacaaccaaatacaatacaggatctttgactaggtcttgtgtgagagaaaatctcctaaagacattattggttcaatttttcaaaactggaatacaagcaacagaatagataaaagtaatgtattgatgttaaatttactgcagttgataactgtatcatggttgtgtaaagtattaataatatcctcattattgagaaatgcatattgaagtatttagaggtaaagaagagtaatgtatgaaattgaaatgattcaagaaaaatttgtgtatagaaagagcaaatgataaaacaagcaggattaaacgttaactgtgtgtcagtctaagaggaacctggctatcctttgtaattctattgcagtctttgtgtaaatttcaggttacttccaaatttagaaaaaaattaagtgaacacatatattgacccaaagttagacccattctgtaacatgaaaatacaaggcaaaaatatatataatacaactatgttaaaagacccttttttctatcttacctaaaacttaacatctccaatgattatccattaataagctctttttattttattttatttatttttttttttttgagacggagtcttgctctgtagtccaggctggagtgcagtggcaccatctcggctcagtgcaacctccaactcctgggttcaagcgattctcctgccccagcctccctagtagctgcgattacaggcgcctgccaccacgcccggctgattttttgtatttttagcagagacagagtttcaccatgttagccaggatggtctcaatctcctgccctcgtgatccgccggcctcggcctcccaaagtgctaggattataggcgtgagccaccgtgcccggcctaataagctctttgttttttccttttctttctttctttctttttttttttttttttgagactgagtctggctctgtcgcccaggctggagtgcgatctccgctcactgcaagctccgcctcccgggctcacgtcattctcctgtctcagcctcctctcctgcctcctgtctcagcctgtagctgggtctacaggcgcccgccaccatgcccggctaatttttttttgtagtttttagtagagatggagtttcaccgtgtttgccacgatggtctcgatctgacctcgtgatcagcccgcctcggcctcccaaaatgctgggattacaggcgtgagccaccacgcccagccaagctctttcttaaagagaagatatttccacctttaactgacaaaatcccaaaaatttatgtcaagaatttatttttaaaaacttctcgaagatcatttagaaagattgataaccacattggaaaaagtataaaaaattgcatagacccctgaaaatatgattatatacattttctttttttgttgtttttttgagacggagtttcgctcttgaagcacaggctggagtgcaatggcgcaatctcggctcactgcaacctgcctaccgggttcaagcgattctcctgcctcagcctcctgggtagctgggattacaggcgtacgcaccaccatgcgagtttcgctcttgtcccccgcgctggagtgcagtggcacgttcttggctcactgcaacatctgcctcccggtttccagcaattctcccacctcaacctcccgagtagctgggattacaggcgcctgccaccatggcgagctaatttttttttgtatttttaatagagacggggtttcatcatgttagccaggctggtctcgaactccggacctcaagagatccgcccacctcggcctcccaaagtactgggattacaagcatgagccaccgtgcccagcctgattatatacattttcaataaacatttatgaaagtggtatcaggccttttaataatcagaagaccaaaataaatgaaaacgaaataacattatccactaaccagaatatgtaaaaggaagactgacaaaatcaggtgttggaaaggacatctaattagaactctcaaacttgtggttgggttatatattagtcaaaaaaatctttggaattaaaatttaattgataaattgtatgtatttatgctataccacattttacatacacacacacacacacacattgtagaatagctaaatctgtgtatatatatgtatagcaacagacagacattgtagaatggctaaatcaagctacctagcatatcagttacctcagatacttatcttttttttttgtggtgagaacatttaaaatctgctgtctcaaaaatttcaagtattaccacattgttattaactgtagtcaacatgttgtacaatagagctcttgagcttttcctcctagctgacatttttagtgacatgcgttgcatttgaacatatgcagttaccatgaccaagctattttatttgtagggctgtacttaactaaaatatctatacatgtgtaccaaaagaaattaacaagaatgttcatagtggctttattgctagtagtcccaaaatggaaacaaaccaatgtccatcaacagtagaattgatagatgtgccatattcatgcagagcaccaccgagcagggaaaagaaatgaactgcttgggccgggcacggtggctcacgcctgtaatcccagcactttgggaggctgaggcggatggatcactaggtcaggagattgagaccatcctggctaacacagtgaaacctcatctctgctacaaatacaaaaaaattacctgggcatggtggcaagcgcctgtaagtcccagctactcgggaggctgaggcaggagaatggtgtgaacctgggaggcagagcttgcagtgagccgagatcgcatcactgcactccagcctggccgacagagcgaaactccatctcaaaaaaaaaaaaaaaaaatgaactgcttcatgaaaccacttgaaggagtgtcacaaatgtaatgctgggccaaagaagccacacacaaaaccattcctactgaatggccctccatgcttccatttatgaaacagacaacactaattggggctgctaaaaaccaggtgactctttgctttgacaagacaggtgggcagtggttagggagcagaccttcaggagagggatttccagattgttatttttatttcattttcttggactgtgtggtagctccaagcatgtgtcctctttgtgataaatcactgagtagtagaataataggattcctgtgtatattatactttaataaacatatttgaattcctttttccattaggacaaataatataaatcataataaatctttgcaattttagtattatttctagttgatgaaaaataagccacctgaaggattccaaacttgcgtatttcaatatagaacttacatgttctaatatatatttctagagatccaaaactgtctgattaatgtcatttgagtgtaaaaaagcacagttatgtttacaatttgctctctaatcttttacttgaagttaagctaattatccacatccatcaataaaactgctttcacagaagagtccaatccatggcataaatgacaggaactttagaaaagtcgtttcttcttcattatttatgtaaaaacattaaatttcttagaaacacaggccagcaaactcccagtttagtgttgctttcattgctttctgtagtcttgttaccagagaagatttttatgttccagaattgcacagagggaaaacctgactattatggttaccactgtggccatcaagacaaggcacttgattcctaggatcccagcaatgaccctccctggaggtgatgggaattaagagacctgctatggaaattgtgggggctgagtaaacagtatctacaaatctttctctgtgtctgatacttgaagtccacaggcagtaaacaagggaagactgcagaacaggcagggagggattccatgagcaagagctggaaccccataaaaataaagtgaaacccatgttcatgaagctaaacacaggccagtaacccagcagtcagagaaactaaaggaaaaatccaaggaaaggcagagcaattacaggcttagctgctgtttcatggcagtgagataagtcagcagatcagcaacaagtgtggtgtgtgtgtgtgtgtgtgtgtgtgtgcgcgcgctcccacgcgcacgtgaccacttgctacgaaattcgttttattccagtgtgtgagtgtgcacctgtgtgcgtgtgtgcactcctgttgacccagtttctgctctgtggccaggtccatgaccctagacgaccccaggtgtgctctcgatgacgtctgcagggatggagcaccgcccctgccattgggtattgcactgtgtgatgccatcctcggggccctcagggtgatggaacccaataggcttccttaggctttcctttcagatggacaggaaatagatgatgttccattgtcattttgttttctttctttccatggattctgtgaccatcttcctctcctcattgactctgccagaaggggattcctggtggggcaagggtagctggtgggaaatgaggtaccgggaaattagcaaagggtcttctggccatctggggacagttctcatgtggtccccagcccagtctcgagggttctgggccggtcaccctgcagcctcggtgctgcgcctctggatccagcctccgcaggaagaaccctgggagacccagcaaaacggggtgcctggtctgacaaacgtccccccgttcctctggctctgcggctcaggaataggccgagacatcatgtccaggcagtgccaggccacctcactgccccctttgaggtgagcacagagggcttttgggggcgagcatgaagctgggcacccagagcctgaggccgactgtccctccctgtgtcctggagtgggggccttgacccgagaagacccccaggggatggcctgtgggtgctgatgcggggaggggaggtctgtggactgaggggggtcattggcaggggacattgagcaccgcggctcagggttctgctcagtggggtcagtgggaacgtggtcagtgaaggcctggtcagtgggggcctggtcagtgggggtctggctggcagaagcctggccaggtggcggctaggtgacttcaggcagggtttgtccttggagcctccttgccgccatctgtagtgggaatgagtcatggcactccggagggctgctgggaagaggaggtgagcaggtgtgtggaatccagccctgccaaacagatctagcactttacagcctagctgagtcccctgctagggaggggacctgccctttgccttttgcccccaaccctcaaccttctgccccctatcttccatctgcaatcccaggaatgccctggatggggaggtctgagtttagggagcacccgtggatgctctgatgatggccatgggtcccgaggggggagaaagtgacaagggtgacccagtgtcctgggtgcacatatgagtggggcagccgggcctagccagagcagtgacaaacgcatgcacacatgggttcacccacatacacgtgcatgcttacatgcacaaacactgcacacacgcacgttgacacttcaaggggtggagggtgctggctctggtcccggctgacccaggcaggggcccattgtgatgggtgtcatgacctcacaatgtcactggtgctgagcactcgcccacctgtccacttgccgtctctatgtctggagctcttagagataagacatagaggtgtctggttctgagaaaaggaagttttgctaagtgagagacacaactgactcaactgactcaggtgagtgtgacctgctctgttccttccctgctgacctgggtacagtcattacctggtgggcagggctagcctctgggcaggtgccgaggagggtcatccctgagcactcaccaggtgcctgttctgcactgacctggtggactctgtggggtgggtgctgtccccgaatgtacccattccacaagtgagatgtctagggtcagagaggaggtgactggccaagagacccagatgtgatcctgggctgtgctctcagccctgccctgtgcatgccctggtctctgtggccctagattccaaatctgcccagggttttctggcccctgatggggcagagtctggccctgaaagagccactgggatggaactcctatgggtgtggtggagggaggtggtgctcggtccaagtctgtgccctaagctgggtgtctgcaggaggaggtctcaccaactcagacttcacgtgcggtcactgagggtctccgtgggacccagtggacacatggggtcccttgtctgggagtagggagccctccgcctgtgggcagttgtggtagaggaccttgaacactgctgctctggggcctgggcagggaggacttggacagtggggacctggtcaggaaggcctggtcactgggggactggtcagcgaggacatggtcagtggggaattggtcatcaggggcctggtcagcagaggcttggccactggggcttagtcagtgaaaaactggtcagtggggacatggtcagttggagcctggtcatcaggggcctgatcagtgaggacctagtcagaaggcctggtcactgggaaaacggtcagtgaaagcctggccggcaggggtctggttagtgggggcctggccagatggttgcttggtgacctcaggcacggggtttgtccttagagcctccttgcctccatccatagcagaaatgagtcatggcaccctggaaggctactgggaggaggaggtgaaaaaatgtgtggaatccgaccttgccactcacacccagcattttacagtctagctgagttccccctaatgaggggccctgtcctgtgccctctaccccctagcccccatctgcatcttcaggactgccccgtgtggggagttctgaggttggggaggacccatggatgctctgatgctggccacaggcctcaagggaaggtgacgctgattaagacttgatgagcacttgggtgcacatgtaagtgggacagccagccctggccagagacgctgctcgtgcacacacatgttcacccacataaacgtacatgctcacctgcacaaacacattttgacaccttaggggctggaggacaccgactctgggcccacttgacctgggcaatggcccattatgatgggtgccatgacctcaaaatgtcactggtgctgagtgaccgcccacctgcccacccactcacctctgtgttgtgcagcacttgcacataagacgcacacaggtgtctggttctgtggtgcatgaacgacttttctaagtgagagacacagcagcctgagcagactcaggtgagtgacctctgggcagatgccgaggagggtcacccctgagcactcaccgggtgcatgttctgcactgacggcgtggaccatcctctcctttgtcctcacagaaactctgtggcgatgggtgctgtccccaaatgtagccattccacaggtgagatgtgtagagtcagagaggcggtgactggcccagagacccagatgtgacccgggccgtgcactcagccctaccctttgccatgctggacttgagctttgaccgctgaggcctctctaccctagattccaaatcttccttgagttctggaattcaatgaggcagggtctggtcctggaagagccactgggacagagcccctgtgggtggggtggagggtgaaattcttggtccaagtctgtgccctaagcttggtccccacaggaggaggtctcaccaactcagacctaaagtgcgatcactgatggttgctgtgggacccactggacacatggggtccttcatctaggagtgcggtggggagccctctgccctcaggcagttgtggaaaatgaaggagccctggagggctgcctggagggtgacaatcgtctctcctggtcaaagagccttggggactggaaccctcctgcagcgtcccattctctctgtctggtcctctagaggccttgccttccgtttgccccgagtattcctggggggggacggttcccccaggtgttctctaggactaaggccccagcgttctcttgttctttcttggtgacccaggaaaacaaagtcccctcctgtattgacagctgggaattgtggtgtccaccgtcctcgacctgcgacggggtctccatgagcacagaggctgctctggagtcaatagatcatcttttccccaaaccaaactgcttggctggcgttgttcctgaagcggcttcactggccagagtgagtgagaattggggtagaacggagcagtcaccagatgtcttgcttcctacagaaaactgattatattcctggtccctgaacgatcctatagagacatccagtccctgactccacctgcctccaggtgcccagaacagcccatcgtggggacttcaccctcagcaagtggacgccgtttgtcctgccagggcaggtgtgtgtctgccttggggtgttcagggacaataggcctctctgtccaggttcccgtgtgctcaaatcctcaggaaggagcccaccactggttggaggcaaggacttcagagatctagtcaggggtgggaccactgagtctggcccctgtcatctgggaggggtagtggaatggggctcaccagactggagtgtgtctgggagtgcagtgcgtgtggtttggctgttctctggagctcttgggtgcgggagagccttgggatgactttgtcttgcaggatggagatggatggggacccgtataacctgcctgcccaggggcaaggcaatatcatcattactaagtatgagcaggtacaagttgggccgctccctcaagggaagcagggcctcgcctctcccgctgtgccctggtcacagggtcctgggcttcctaagatcacagggtggggaggggctgcccacctccctgggcctcccacacctctcaccttacccccactatcctggcctcctctgggtttcagggacaccgagctggggcagcagtggacttggggcatgagcaggttgatgtcagaaaatacaccaataacctcgggattgtgcagtaagtcctctgtccccccgaccccagccaccaatctcacctcagggatgggttttgtttttagaaaggcctctctgaagcaggacatgtctccctggctgggccaacctcctctccagggtcagaactcctcccaggctctcctgtcggtccagcctgtggtcagggttagggcacagcctcatgacacatttagggagctcaggagagggggtagggacagagaggggactagagcaggcccgtgggctctcagcactgtggtctccaagtaagctggagaggaggggcagcctgaggatctggccctgttcccttggggcctgccttggtgagatctgagggttgtggccacagggcaagagggcacctggcctggcctctgggcagttgtatagcagatctctgagggctcagggggctcagccatgaggaaggggcatagggacagtgagggccttggccctggccctggtaggttgtggaagaagggcagggccctggcctgggcttctcactgaggccagggggacaacagagcatgcaactgaaggccccgggagtggtgcagggaagggacctgggcctggtaatgggagcccagcctgaagccggcccctcaggactcacaggatggagagagggaggagcctgggggaggggggcagggtgagcccctgagacctgccacttctggaaggcacctgaaccaagccagacccgggtggagctgacagcctggggaggacaacagatggggtgggcagggaacagtggctcacctgggacccctcagtgggggaacttggtcagtccccaaggctctgcatggccctccagagattctgcttcccgctggctcaatcaacactgcgcagggtggatggaggggccaagtcagggcaggcaggacagtaggggaggacagccaagcatcccatgtcctggtttttgcagtggctgggaggaggctgagggctgaaggccaatgaccctgagagccagctgaggctggagcaggagtgctggggccagccccactgcctgcagggcccttggtcatccttgctgccctgggtgtctccccagcagtgctgggcagcccagtcagagagtggccaaggcgtgggtgtggacggatctgggaggtctcactcagaggttctgaaaggacaagggtcacagaagggccagggtggccggagagagggtcatagtgtctgggctgggcaggatgggggaagatggggagcaggcagggtgagcggccaggatgcagggagaggcaggtgcacgctgggaggtcagaccttgcaaggcccatggggagtgtcagatgggatgggctccaggtgcatcctcagggcactgggcagctctcaggccaggctccctggactctggtgggtgatgtggtcactcctgaggtactgctgttagtcagggcttggccacccaccctgggtggcacccatcccatctcagaactggactttcttagcgtccacagagggtgtcacctccagcccaggtggagcagcaccattgtgcagcccaaggcaccccacgggcttcaagtgtcccccccacccagggccagctttgagcttcttcttctccaaggtcccagtgccttgctagtgtcagatccgcagggaggcccttgccttccttctctgtgccttgtcccaggctgagacttagggtggatgggggtaggctggtccttccctggggccctctcagggagagggatggctcctggcctgggcaggtcctcagctctgcctgggttgccttacagtgagatggagctgccccacgtcagtgccctggaggtgaaggtaagagcctgtgcctgctgcgtgggaggctgcttcagggactgggaatcgggtggtcggtaaggcagagggggtggcctgtgggcctgtgtggtggtgagtgggccacggctgtcactgggaggggtggcctttcctgctggactctgttcccatgaggacttgaccaaaacccaaaccaagaactgcagtcctggctcagagtccactgcctgtttgaaccaagaccccagctgaaggctggacctgaccaaaacttggggcatttatggcctgaggatggcatgtcatggcatcaccattccagactaccagctccagttccttcagagggtctcagcccctggggcctgccctttcctggcttcttcaagttgggtcccttcagggccccaaagccctggacccagcatccacgggccactgtcagacgcctggcagctccgctaactccatcatggctcatttgacagcaaagacgcaaggaaagtaaacgtaccaacaagtggcaaaagatgcttgcagactggacaaaatataggagcaccaagaaggtaacatggggaggaagtggcccgcgtgactgctctctgcagagccaggagacaggcacccatggttgtgacctggcaccgtctgcctctcagtgggtgggtggtaccccatccttgccataggactgcaggcctgttcgccagctttgctctgcggggtcgccccatgtcctttctcactggagtgttcttctgtctgtagctgtctcaaagagtatacaaagtcattcccctggcggtacggggccgggcgtggtcacttttgctagatattgacagaatcaagtcccagaacccaggcaaatataaggtaagtccctcccacactcagctaggagtacaaacaagctagactgtatcaggagcccaggactccagctggagggaacgttgagcctgggttgggagtgggggctgtggtcagacgcacatcctgggcatagatggtaactcaggcaccacaggtgcgctgggctctgctgaccctccctggtgtcagaaacaaggtaaaaaggagctttctgcagaaggaaaccttccttccttccttccagaagtgctgactgtgggatgactgccgtttggggcagggagtcttttgtctgttctgaggctgcttcctcctcttggccctgccctacaggtcatgaaggagaagggcaagaggtcctccagaatcatccactgcatccagctagatgtcagccacaccctgcagaaacacatgatgttcatacaaagattcggagtcaagtaaggccaatggggcttgcaggggtcccagggaagatggggcaatccagaggaatgaggttgtccccagggcagaggccagggtcacccaggagaggtgacagagccaccaagggctctcctggcccagggagcagccggcaccatggactgagcatctcccggctctaagctctgggccgggctgggacatgtagggccagaacccaggtgactcccaaggagacggaaggcagaaaaaaaaagagtcatgcagatggtgaaaagtgctctccatgacccacaactatccaggatagggacccatgggaaggtggcacgatggcagggcttgggagccttcccaggcaacactgactgcccaaaatactagaaaggatgcggggccccggaaactctcatccatggctggtgggaacgtgacagggcacagccattttgtaagtcacatgggctgtggctcacaaagctcagtggcctcgtaccacacatccccaaagtgtgacagatattggccacactgatttgaaaactgacgtccaagtaaaacccgcatgtgacgttcaccgcttgattgattgtaactcacacccggaggctacggagatgatcttcaacatgggaactagggaggaagggggttccactcttcagacagaggcgactcagtgaggaaaaggaacgaacccccaatgcccgcaggaacatgggtggatcttagatgagtattgctgagggaatgacgccagacccaacaggctaccaccatgggattccaattcattggccattctgggaaagggcaaaccatagagacagagaacagatcaggatggccaggggctgacagagccgggagacgttggctgcaaaggggacgtgctggggacttggaagatgaaggagccgctctgggaggggctgcagtggtggacgggaggctctgcacattagttcagaaccgtggaactgcacgtcccaaagactggacttctgtgtgtgcaaactgagaaaaaggggaagaaaaaatcaaccagagtgaaaaatgatcactgatccaactgtacacctacgacattgcattgcaaggaatgtggattttactgaaaaaaaattcctaaaaactcaggtgtcctaaagagctcactgcttatttggggggatcatctgaacccagaattgtgttcgttatttgggtttgtagacaaaatgaaattgacagcgtctgcacacacacaaaaaaaaaaccctctttcccctcttttctaggcagcaggaattatgtgacatcctcgtggcctattctgcatataaccctgtgagtattcccgggcagcgatattcctgggacatgtgcccatattcacaggcatgggtgtctcttgggggtgttgcaacttcttgaaaattcagtgtttgtccaccaggacgtagtaggcaggacttcagctcgctgctggcagaaaagggctgaagcccagactcctggtgtcacatggacccaatcaccacgtctcagatgaagaaacgaccttcccctcctggtgttgccccaaagcctaggagcttggcagggtcccacacaggatggtccttgtaggagacaggtttgacaagttgctgaggtgcctgatgggccaggcacttgtcatgaaatgagtttgcatcctgggggagcctcttcttcactggaaacctggcaaggatccaatttcccctttgcctgaaccccataggagcatagcagatagggaggggggtcacccaggtggctgttcctgcttggcccccactttccagaccattccaggcagggagagctgctgagctgactgcatgagctgcccacatggaggacccagccaccccttatgtccggcaggcagcccttgggctgttgcaggaccttttgtgtggtggtcagcgccccgctgcctgccctcgtggcaggtgcagttcacaggtgctgccccaggcctggcacagtggcctccccagcctggcccaggggagggagcatgaacaatccctgactgtgccctttcgggccatgtgagcttggacacttgctgcaggagtccccccatgctccttgtcaactgagttgtgcgtgacctgctcagtcctcatgtccagtgccaggggaggggtgcagaggctgcacctcaaatcccctggggcctgaggcaggtgtccccaaagacctgtgccacctctggtgacataagtcctcccaggtggcctcagtcctcctaggtgacatctttccacggtgactctggctcttgcaggaggtgggctaccacagggacctgagccgcatcactgccatcctcctcctgtgtctgccagaggaagatgctttctgggcgcttacccagttgctcgctggtgagaggcactccctgtgggtaggtggacagctgcccccggggccttacacagccatgccaggggacagccaccctggccggtgaccctgacttccaggcaaggtgcctgccttgtatcccagcttgtttggagcctccaggatgtccctgctgaggtcctacagcagcctgggtctggacaggaaccccctcacctcaagtcagacggctttcatccctaacatcagagggcatggatacctccccctggctgccctctgtcgtccgaagccagccccaactttgtgcaggcaccactcacctccctgagtgtcttcctgcctcccagctggctgtgctcccagccaccctccctccctacagatgggccaacaaagccaagatggaagtgtctgcccatcccatgtcccccagcctgacccccacatccaagagatagccacatagcccccagctcccaccctgttctccccgctggcgcctgccttgtggtgtcaaatgcaggctgccctcctggcacctggacccaggaggccgctaggcagtgcctccagccagggacctcctccccagggctgaggctacatgctggggtcaccacatgggagggagggaggcctcggggtctggggtcccctgccctgcccagctcttccagctgatgcctccacattttgggcgtggggtctgatggggtgatgggtcgcgggcttctcagtattctacagcccaaatactgcctggctcgagaggctcctatcgcaccaggagcaggtgctgcacaagtccttcccaaagatcatgagacacctggtgagtggatgacaccctcagctcctaaccagacgccctggcccccataggccaggggaggctcaagtccctcatggggctggcaagaggctgagtcccagccacggcctgacctgggatggggattccccatggattcagcgttgggtttccttttcctgccctggcaaaggcagaggcgctgggaccagggccgagctgcagctgagcagggctaaaagaagtgtgtccaccgggcgtccgtgcatggggcaggtgttggagccctggccaccgccctgggttgtgccattaaggaaggtctgcagaggggcctggaagtgggaggatttcagggcagcccagggggccctgagcacgtgtgctcctcccttcagggcaaggaagggctgtgcattgagggttccatgctgacgaggctcctccggtgtttccttgatggggtaaggaggcacagggagaccccagccctgggactctcctgccctgcagtgcccagcttcctcagctcaggggtccagctcccccaggaggacaggctcacaagccaggctctgcccaagagggggcatcccatggcagaggccagggctcaggcccagcctcatgggcagactggggcaggacccgacttgcgagggcccagggaagcccaagtcctcaggaagccctctttccagaagccacagcgcagttgagatgagtccctcacaaggagctacaggaccttgtctgactcagtcttttgggggtctcatcccatggagaggggtccccagcactccaggggcctgaaaccccagtgggctctgctcaggccactggccccagcttggaaaggccaggttctcccacacttgctgtccccacagaaatccttcgggctcaccctgagactgtgggatgtgttcatcttggagggcgcgcgggtactgacagccatggtgcatgcatcattcaaaatacacaggagtaagtcccgtgtgcccgagggtgcttgggggaacatgtgggacagaccccggctggcctgagggaagtgtccttacactgcctgctccatccgggttggggggtctggcctgctgggctgggcaagtcatgatgacactgagtccatcccccacatgacccagatgaaaatcaggagtgtggtgagcacttccctgccctgccttccccaactgtagcctcctgtgcacagctgaaccccagggtggccaaaaaggaccagacaccacccagtgggaggtgggcctggtagaaatggggtgcaggcactgtcccctcccagggaaccctcctggcctgatgcccgccctctccctagagcacctcatgaagctttcctggagcactgtctgggagtttcaggagcgactctctcagagctgggccctggaggacaacgcggtcctcaggaaccttcaaacctctatgaaggaactcacaaaaaaacactgggacctgccacccccaggtgggctctagcaccaggtaccctctggagtcaccctctggggcagtcaatggtggggagtgccgtggccccgccagccctcctacctggtcttcctcctgcacctcttcttcctcctcttcctcctctactccaagaaagtcagatgggtctgccagtcctcagggcgccgtggctcacacctgtaatcctagcactttgggaggccaggtgggtggattacgaggtcaggagatccagacaatcctggctaacacggtgaaaccccgtctctactaaaagtacaaaaaattagctgggcgtggtagcaggcgcctgtagtccccagctactcaggaggctgaggcaggagaatggcgtgaacccaggaggcgggacttgcagtcagccgagatcacaccactgcactccaacctgggcgacagagcgaggctctgtcaaataaaagaaaagtcagataacaaaggtttgccacagaggcatctaaaaaagtagggggctgaactattcagaactcagaggcttcagattcgaagatgaggccaagcaggagactcctgacccactgagggcaagggaaatatgtggggttgctgggagaagatgtcataaaggtccacccccacctcgtggtatgtcacagaaccatacacttgtatagctgtgcacatcttctctccactgattatagtatttctttccatttgtgactctccaatcacgcagggagcttgctacaaaatgcacattgctataccatagcctggggcttgcaatccaaggctggcaaggattcctgcacgtcaagggcctcaggtgactttcatgcacacccaagtcagaaggctctcctgaatcctggatgtcaccttcctgcccaaaaaaggaggaacgagggtcaaccagcagcagaccagtcacaaaaagagatgaaatgtgagtgcatggccttcctgacacccagacaaaactttgggcacaaagccaggctgcagctctggccactgacttggaccagggatgcccccatgcaggccggtgtgccctggctgctcttgacaccctctggctcctgacaccctctcttcggctgcctgcgttaggaagggagaacctgccagttttcagaagaaaatgtagctttattataacataggaaagactgcaagttattacgggaggaggaggaggcctgaaacagctcctgaaaatgagagggaaaaggaaggtgtaaatatgttggtaataaaatctccaaccacagcatagtcatgggaatgtttttgttacaatttttgttctcaaggttatagtaaacaaaacagtcacttgaattgtcaaaagagcagcagttttgcacaatgaaaagcatacacaccaagccagaatacaatagcactcaggtctatatgttgcagtggtcctagtgccagaggaaacctccagggagtttgtagtgaccctccagggagcccaggcccatggagggccctggggctggagggaggccagcaaaccactcagctcaaagcactcccttcaggcacctgaagagggaaagcccatgtgtcttcctgtgaagcactgaatgggcagctggcatctcagaaatgcaggcgatttttcatacactggtgtgaatgagtctggggcacccagggggtcccgcagtggtcagacacactttgaaacaatcaacacatacacaggaggttactaggaaacaggaaaaatgttttcctgaatttcatagcagattgggagctaaaggaagagattcccaagcccatcatggaaatattttaacaaagtaaattcacaagagcacatcaaacacaaaacctaatgcaaggggcagtgcccagggccactgcctgcctccggtgagaagttctttagcagcagtcacagggcaatgcttagaaaggcaatgccacagtgaataagggggattaacttggatccaaaagtgtaggataatgcccaccaagaacgcacgtggctccatctctcttcccagttctaatgttctcagagcagcagccacccctgaacacaaggggagacaggaaagggcccaggggtgtggggatttattcctggtttctttattaatttccactggtctgtgtgtctgtttttatgccagtccattgctgttttgattgctatagttctgtagtataacttgaagtcaggtaatgtgatgcctccaattttgttccttttgcttacggtagctttggctattttgggtcttttgtggtttgtttggattattttttctacttctgtgaagaatatcattggtattttgacagggattgcattgaatctgtagattgctttgggtagtatagacattttaacaatattgattcttccgatctatgaacatggaatatatgtcaattgtgtgtgttctcttcaatttcctgcatcagtgctttatggttttctttgtagagatttttcacttctttggttaagtttattcctaagtgttttgttttatttatatctattattaatgggatttcttttttaatttctttttttagattgttcactgttggcatagaggaatactactgattttcgtatgttaattttgtatcctgcaacttaactaaatttgtttaactattctaatagttttctggtggagtctttaggtttctccaaatagaagattgtatcatctgcaaacaaagagaatttgaggttttcctttccaagttggatgcagggctgttattttatttcaggccattttccaagctcaatggtttttgtcagaattcagttcctgtagttacaggactgaagattctggtttctttttgcctgtcaatggagagttgttctcaactcctagaggctgcccaccattctatggcacgcagccttccccacagcatggtaattgtttaccatggaagaaaatcttagaagaaatcttcatatcacctaccatacagttccctctaaatttcaaatgttcatattttccctaaaggcaaaatatatttactccctctcaaagatttcatctcatcatcagctcaaatccaaagtattattatctaaatcatatcatctaatcacctcaaagtccaaaatggcccctaaacatcataaacttgaagttcaaaatcttaccttctaaacgttctaaatcaggtgcagatgggtacaaatcatttagtgcagctcctgggggtacactttcaacttgtggacctgtgaagctaaagaaacaagttattttctctgacaatctgtttgggtgagcagacccaacaccagatcttgggggttagggctacaaagtctggcagagttaaaggaatgagacaagagtacataggttgggtccagggggccaatgctagtatggaggctgcaaaggctctgatctccgggagcccacactatttattggtaatcgaacaaagaagcaggtggtgaggacatgcagatgtgggggtagacagatgatgacatgaggatgtgggggtagaaaggtagcagtgcatcaagcgtagctgtgacggtttagcatatgctctgctacttgaggtaagggagaatagattcttctaattcaagatacaatcaatttatgatcttgggagagcaagaagcaaggggccagcgagtctggacacattccagaggctacgaggggttttattccctgagccctgggtgctctccaaaccacaaggggttttatgcactgggcttagattgtagtgcagcagggcagccttccaccctttggcacaaagcttggtgttccctaggccacgaggggttttagaccatggacccaggacatgttccaagactcttttacattatgtcagacaagcaagccctgcctcagcccttctaccaacacaattctaatatacattactggacaggcagaggataacagttatgtgcatctggataaagataggtggaggaggctgggcttggtggctcacgcctgtaatcccagcactttgggaggtcaaggtgggtggatcacctgaggtcaggagtttgagagcagcctgagcaacatggagaaaccccgtctctactgaagatacaaaattagccaggcgtggtggtacatggaggctgaggcaggagaactgcttgaacctgggaggcaaaggttgcagtgagccaagatcacgccattgcactccagcctgggtaacaagagcaaaactccgtgtaaaaaaaaaaaaaaaaaaaaatatatatatatatatatatatatatatatatatatacacatagacacacacacacacacaatatgttcacaaattaacaaatgagccataaattgaaagagattaaaaattaaagaagctatttcattgaatattatactggtcatcactgatgtttgccaaaatgtaaagatttcagtttctggaacatgtatgttaataaattatagataagaatacatgtatttataaatatatttcaacagtttcacttcctcagaatagtgttacaactcaagtatcaaagaggccaattgggtcatgaacacatagactcaatgtttataatctaatctttgtggaaaaaaaatgctcaaaaacctagagatgtgagcaataccagtaaaagttctaccatttgtcaagattgtttaaaatgagaatttctatttccctggttggctgttacttttctgaaagcctgaggagaggagaagctgtcagtggaggtccctgaagttacccaggcccaggagagacacagcatcagctgacaactgcagtaaatgccactgaagaccctcacggggaagaggctgcagaaccgtgtctgccatgctcgtgttttaaatgctggccaaaatgagtcaaaacttcttttccttttttaaatagaagcattttcaggtactcaaaatatgtcacacaagacgaatttattatgttcgccctatatcatttctttcttaaacaatttaagcaggagttatttcacatactgtatttggcaatcagcttttgctatttcgaaccactgaagacaataaatttgttttcttcctcttttctgtttctttctttctttcttttctttttttttttttttttttgctcttgtcgcccaggctggagggcagtggtgcgatctcagctcactgcagcctctgccctcgctcgctgcatccctcccttctgcaggtaagatgccaatatttaccctactgaccgtggccagttcttggtattgctcaagtcccctgggccttcagactggcgggtgacttcaagggaccaaccaccctgggcctctcctgggacaaacacttgccttcacccactatcgatgtcttgctcagccctcagaggagcgtggttggcgtggattacttcatgccttgattctgccttcccggaaaccacggtggcagcaggcttggatgtcaccaagccaccgtgtttcatgctatttctggaagttctcgcctttgtggcctcggaaaggaaggcgatctggtgctttggggaaggccctcgggatgctcctccagatggtcttcttcaggccttttgctcagcattggtctgatcagttctgccagctctgggccatgatctcttggcactggcgcggctttccttcaataattccataaactccagacttcgtgtcttttgcatggaaagcacgcggtgcccatttcatcgacaccgcaccccggagtccaaacgtcagccctgcgggtgttgggtttgttggggacaatttcgggctcaggtgcagggggcgcttccccagcgcgggcgcgtcctgggcgccatctgaggccgtgggctcctggcaggagaacctggagctttcagattcccgggaaggatgcatttcccccactcttgggcacaagctgccctttgctggcgttgggcacggatcatggcctcgcagaagcccgcgacagcgtggagcaggtggtgcccctgcccaggactcctggtgggtgatggctccgggaggccttggctgggacagagcggggcctccgggtcggtcagcggcccgagcccggctgcggctttcggaggcttgggtttggaagacaccgcctgccatcccgcggcgcctctcggggtccgctcccccggactggccctgcccaccgcgcgcgactagtagcgggcggccaggagtcagtggcaggcgcggccggtgggatgccgggtaggaggctgccctggagcccgctgggcagcgccgacccctaaggcagccgggcgggtgagcgagcagaggcgtgggcggctgaggggctgaaaggctgagggcctgaggcggctgaggggctgaggaggctgaggggctgaggggctgaggaggctgaggggctgaggggctgaggaggctgaggaggctgaggggctgagggcctgaggcggctgaggggctgaggggctgaggcggctgaggggctgaggggctgaggcggctgaggggctgaggggctgaggggctgaggcggctgaggggctgaggggctgaggcggctgaggggctgaggggctgaggggcgggcagcctggccggtccctgccgcagggtccaccggtccctgccgcagggtccaccgcacgtcacgtggccgaatgccccgggctgctttctgtctgggctgttttctcactgtgaacctcgtgggctcctgctcggtgtcctttcttactctgtctctgtttttgcattctattggcaagaatgttatttaggatattttactgatataactgaggatgaactgtgttttgcagcattttgttttattacgcgttttctcctagattttggtatcatttttacgctgacttgattaaacattttggaaactttcctggaactgataaatagcttttatatgatctttttcttgaggtaataaaataatttactttgaaatgtctcagcctaacaacttttgtgcttttgttgttttgtgcagaggtgggaagactcctttgcatttttggtatcacttctgtgttaatgattttgttgtttgtttcgcaaaatcacttagtgatccgtgttttccaacttagagttaacatgcaccattttgcgacataaaaaaatgtctcgtatatctctttgtatgtctcttttcgtttgtcatatttggaattgtctttttttttttaatcattagtttaaagcaggaatttattaaatattccaaaaagaccgaagttttacttcatctcctaggcattcatttttcagtgtgttattcactgatttctccacgttcattaatatttggaataatttatgtaaattgattattgctgtgttacgagcttacggagcaacattctttgtcttcagtattttaatgtatttttctattaaatatacttcagtcacttataccatatttaggattattttcctaattctagacctactaattataaactggaatgctgataattttccctaagcttcaattgtttatgatttattcatttatttatgacagatgggcataaaactactttattacaaagatttaatgatatatcgtgtagagattttatactatgtgcttggacacaaacactcttaaataattgtttattttttctacctgcttttgacataatgaaagtgcattttaaattttttaattttttaatttagttgtaacagactttaggatgtaatggtcccagattcttttgttatctgttttttagccacattgtttattctgttgtcattatataatatttacacgctgtattagtctgctcaggctgttataacaaaatactataaacagtgctttcaacaacagacatttatttttcacagccctggaggctgggaagtctgtgaccaagacaatggctgatttggttcttgaacaggctttctgtcctcttcttataagggcattaattccatcataaggaccccactctcatgacctcatgtaaacctaattaccttcaaaggccctatttccaaatcccatcacactgagagttagatcttcagcacataaattctgggggaaacaaatgttcatgccataacacacactgctgaccctttgtttccatttccgtagttgtttagtgttattatttataatattttggaggaataccctaattataatatgggtacttattaattttgtaatacaaaatgcatttattaagcagtgaaaatgctaataaagtcatatagtagttgcttcctatactatatatatcttgcgatatttcagaaagattttgcataatatatgtaatgctatcattcaaacatctttaataagttggtcagaaagagaagaatgttttccatcttcaaccaaactaaggatacattccaggtccaaatcaccaaatacatgaacttagatttaaatgtttgtagtcaggcattcaactgtttaattacagtccacccggaacacacattttattctcagttctcatatcagcagggcattgataacgtgtatttgtctaatggcaagtccaagcattagcttttgatagcatcttaacccaatttgacatttctgtgtgtgcttaagtgtccagacaagcattcaccaatgctttttctgatgttggaaatgttctctctgctacgaaatgtgttaaccactacccacatgtggcttttgagaagttgaaaggtagctagtgtgactaaccaaatttttatattattgtaattaatttaaatttaaatgtagtagccatgtgtggctattggacaacgtgcctctaggtcattatcactggtatctagatagatgagacaattcacagaagcctcacacttaaccccattcttcttaatgtcaaagcatggggcctgctacttcatctctctacacttttgaattatcactcattttttaccctaacataagtcaaggtagatattatgccaaaaattacagaaaagtagtgacaggccaggcctggtggctgtaatcccagcactttgggaggctgaggtgggtggatcacgaggtcaggagttcgagacccacctgaccaacatggtgaaactccgtttctactaaaaatacaaaaattagccgggcgtgatggtgtccacctgtaatcccagctactctggaggctgaggcaggagaatcccttgaacctgggaggcagaggttgcagtgagctgagatcacgccactgcactccagcctggatgacagagtgagatgctgtctcaaaaataaaaaagtaaagaaaaaagaaaactagtgacaaaatcagtaacttagcagttttccttgaactcttcgatgtggtccagtaaataatcttgtggggttttttgtttgttttttgctttttttttttttttttttttggacagagtctggctctgtcacccaggctggagtgcaatggcgtgatcttggttcactgcaacctctgcctcctgggttcagatgattctcctgcctcagcctcccgagtagctgggattacataatcttgtgtttttactatgatctctatatgttgattttattatctttaaaatgataacgctaggaagacctacttcatattattttttttttttaagacatggtcccactctggcacccaggctggagtgcattggtcctaacagggctcactgcagcctcaacctttcaggttgcagtgatactcccatctcagcctcccaaggagttgggactacggctgggtgccaccaagcccggctaatttttagattgttttatagagacagggtttcgccatggtgtccaggctgatctccaattcctgagctcaagagatctgcccaccttggcctccaaaagtgccgggattacaaatgtgagccatcgtcccccgccctctataattttaaattaggcaactgaagtaatgcatacagcataccatatcatgttttataaagcataaagtcaggataataaggtggttaagagcatgagctcagaggtgaaatcatgctggaaacagttacttttggtaagaagagcaacacttggaacagaagataaaatgatccttgaattatttgcaatgttttcatttttacaaaaatgtttatgtttgcatttaatgtgaaggggaaattttaaaagaactattttaaataatacaaaatatttatatcatcacttttttttttttttttgagacacagtctcgctctgtcacccggttggagtgcagtggcacgatctcaactcactacaacctccacctcctgggttcaagcgattctcctgcctcagcctcccgagtagctgggattacaggcgcccaccaccacgcctacctaatttttgtatttttagtagagatggggttttgccatgttggccaggctagtctcaaactcgtgacctcaggtgatctgccaccttggcctcccaatgtgctgggtttacaggtgtgagcaaccatgcccggcctatcattacctctttgtttattaaagggttacattaaaatgaggatttaagatatcatttaaattattcaaattgttattcaaaatttgagaagaaaatactgggttacaaaataggcattattcgtaagttctgtgtcctgctctgagcataagtggtctgatattaggaaagtcaataattaccttagtagtactttcttttcaattaccataaataaataatgtaattacatgtatcatttaatcattacatgtggtaagtcagtgacacacacacacacacacacacacacacacacttacacacacagagtgaatttaccagatgcatcccatcagtctggcaaaacgcccatgattaataaaatatgtgtggagacatattggtccctactcttcaaagtaaaattcaagtgtattatctttacctttgaaactgaaagtaaggtaatattctaacttttgaagggataatcattctaagttttaactatgagaatatttctatcattcacttacctatttcacaattctgagacagcctgaagcaaaatgaacaagaataaaccatatgtattaacatatattaccttatataaaaattattttgactgtacttctgccctttattaagacatatgccaactaaatattattttaaaggagctatagatgatgatgaaataattttcaagtacagtttttaaaaaagctacatctactcttgctgctcctgtcacagcctagatttatagctaattttcatgagttacagttttgtattacacatccccccaccatgccacttcccagcttttaaaagaacttaatgatttttaataggaatgtagacaaagtattgctgcctcttatcagaatttactggcacctttgcccacaaattggaggtaaaatatgtcactgtgacccttattggtatccctgatgtgtgacatcaattgcacattttctttcctctgattttatgtgtatgttttgtagatcagataaacctgggacatgttgtccaggcacggtggctcatgcctgtaatcccagctattcgggaggctgaggcaggagaatggcttgaacctgagaggtggaggttgcagtgagccaagattgcgccattgcactctagcctgggggagaagagcaaaactccgtctcaaaaaaaacaaacctgggacatgtcaaaatttctctaatgaaatacttgtgtttacctaaaataaattcctattagaacaataaaagtgagaaacaaaacaaacgcaaaatggaaacaatttgtataacctggcaaaagacagtaacattaacctatatttaatgaacacatcaaaactcaaaccaataatttatcattgtagtaaaaatatacaacagaaattatgagatggtttcgtcagtgaaaagcactgtgtatacaatcattccctagatgacttcatatttctctagcccaattctaataatttgctcataatagtataaatgaaactgttttccaaataatattaatgtctaccttcgcctatcaccattgagtcaatatttgtgtgattctataaaatttagaatgtctagaaggatgcctttgcttttgcaatacaaaaaatggcctaacacagatatagatgataaagatatagatagatagggggttgcattttgaaatttatttcttcaagggacttatttcaagtttgaaattattctggttttaaaattaacaaatgataaaccttatagaatgataacacaattgtacatgttataaggtcacagggtatatcatcaaatgatgaaccaatcattttgtgttgaggtttggtagtatttatttattttttatttatttatatattttttttttactgagacttcaatttgagaacagtttttgtacggaggggccctaccactgccgcttactggggctgttctcagactgtgagattctgcccacaccaagccatgatgagagttttattcctcatactgctctcagtacttgtttgcatcccataatatccccccaaaagttcatttttcatgctgtttgttattcgcttacatttaatacatgtatcaaaaagtcatttttttttttttgagacggagtttcgctctttttgccctgcctagagtgcaatggcgcgatatcggctcaccacaacctccgcctcctgggttcaagcaactctcctgcctcagcctcccaagtagctgggaatacaggtgcccgccaccacgcccggctaattttgtatttttagtagagacagtgtttcattatgttgtggccaaactcatccactgttatatagaaaatagcctagagaaggaaagctccaagtgcaaggaaaatctgcattatcaaagcaggctaagcagggaagaccatttattttcccaaaagattctattctgtggtcttcccttcatagacacacatcccactgtcagatgcaaatcctagagctagaaatggggcattcaaggtagacagagctcctgggaacagcacgtttgcagagatgggaagtgaccctcccactgattttggtttctccatggccacgggcaaagcctgcctgctctgcatccagggatcttggtcaggtgttggaatcggtgggtggattgccagtacgtttgcactgtgtcctagagagcctctatgcatttcaactctgattctccttcaccatctacgtgcagcccacaaccgcaggaccccacccctggccctgaatctcccatgtcctggcgccaagcaggcgagtcagcctaggaggaggcagggctcccggaagccaagcccatgctgggatggtgagaaacaactttcctatgcaaggaggttcctgagcacccgctgatgatcaagccggagccccctcacctccccgaagtgtggtgaaggaaagacaggccggaaagaggcggcagtcttcacctgctgtggttgagtttctcactcatgccaagttttacataagctggggaccatgtgcttcaaggctagaggtcttggcgggcccagggccttggaggggcctggatgaccaaggggtctgagacttaggccctggctctgcatggggaatcttgggaaggttggaagcccacagcccctactgagaaaggagccacgggccagatcttttgcacaaatcccacctgtgctccttgaccgcccctccccaccggggccacggtgaccaggaggcagaagcctccatccgttcacaggaccagcatcctgggaggaccctggcctgagcgagctgctgcaggggaccctcatgctggatggttggccactcggcacccttttctctgtggagcagggatgacatttgagagccaccaaagatgggcaggaaaaacaaaggccaccacaaaggaagctgaaggcagaaagagatgcagagaaagtgggagaaactcggctgtgctttgtgggggccctgcagggacatcggctcctgaagggatgagagaaagagtcccctgaactttgacactctgttcttctcaaggcctggccagccctgtggctccttagaggaatctgggtgccttctgtccctagtacctgacaagccccaggtgagaagacctgagttcacctgcgctgccacgtgtaacctgatggccctggcaccctcgcagggtttgaatagctgccctttccacctgtttcccggattttccacaccacccagaggctcatattcaaccccacagcctacaagtcagccaggggcctttggccacatgtactgatgatgagaatcactggattgtaagctgtaaaagcacaaggatggtgttttgttccccgctaccccctgcacctgaggcccagcgaggattgctgctcggatgaaggagagcgagtgttcatggagctctttgcagaagccacgggaatcccttcctgtgccttctcaggtttagttctcagacagccccactttccagatgaggaaacggaggctaagaaaggagaataaacttgtccagaatcagtggtgaggctggtatttgaaccccatcctgttggactcaacacttcctctgaagagacagcataagggagctgcctacttctggcttcgggaactggcagagaggagcagagctgggccagacgcgtcacctcccaagctctgctgcacccaagggttcccagggtcctcttcctccatttggctcttttcttctctggactctcccaccttcgaggattggactccttgcagggagcgcaaagcagagaacagaggaggcccatctgaggagagagtgctggagcagatggggcacacagagagcccccaaaccttagcctcacctggagagtggctccctgcaagctcagcccctgtgtgcccagaagtgacataggcattcagaaaaagggactgagggaggaaagaaggagccattcctcttcccaggggcgcctgccctgggttcctgagggaggctccatgtttacatctccaaaggccagtcccaaacacgccagagtgcaatgccctccctcagacccagggccatcctcggagcagccgggaggcagcctgtccactcttaccacaggcaggtcgcccaggcagcctcctcttagagctcctgaattctggagcatcaaatagaaatgtgaaaaacaggctgggcatggtggctcacacctgtattcccagcactttgggaggctgaggcgggcagatcatttgagatcaggagtttgagaccaacctggccaacacagtgagaccctgtctctactaaaaatacaagtaaataagccaagcatggtggtccacacctgcagtcccagttacctgggaggctgaggcaggagaatcatttgcatccaggagatagaagttgcagtgagctgagatcgcgccgctgcactccagcctgggcgacagagtgagactccgtgtaaaaaaaaaaatgagagagaaaattaatgtgacaaaatgttaacaatgggtgaatgtaggtaagagtatgtggcagggtgttttttcttcttgcaaattttgtgtaggtttgacgttacctcagaatagcaaatataagaatgattcctgcagacacacgagtgatttcagctgttcacagggctcaggcaggaagcagatctcttgccctccctctgatccaggtcacttagtccagtccctgaaagcagtggatggacaaccatgccaccctctttcttcaaatacaccttattttgtatcctgccctttttgtgtagcattagatcatgagcattttcctctgctataaatgtcccctcaaatatgttgtttcttgtgactccctagtgttctacccacgatttcctcggctgctccaccttggtggaattcagtgattcttctgccttttcaccattgtaagtgatgctttgatgaacagctttgtaggttcatctgtgctgcacctctgaccagtctcttctggaagagtctaacgaaggagacagaggcatggaccactggcttttgaaggcattcggtgggtcctgccacgccgccttccagcattccagaaaggtggtcccagtgaacaactcaccagggcggggccccactccacggcaccccagcaaggccagcattcgagaccagcctgaccaacatggtgaaaccccgtgtctactaaaaatgcaaaaattagccgggcatggtggcgggtgcctacaatctcagctgctcaggagactgaggcaggagaattgctggaacctgggaggtggaggctgcagtgagccgagatcactccattgcactccagcccaggtgacaacagtgagactgcatctcaaaaaaaaaaaaaattagaataatcttgtacatgttattaactttaattttgcatgtaacttttttaaaatgattaaacttttctcagcatattctcatcattaaatattatttaaaacattattttaaggttagatagtattttatcatataaataattcatatttactagtcccctgttgttgaacatatatgtattattgaacctttatgttctttccagtctttcaatattcaaatacttttttcaactctttcttattacttacttaggaaaaatttctagatgttgaattactgagtcagagtataaatattttaaagacttctaacatattcagccagattgcccttcagaaatattataccaatttgttccagcagtcatgagaacacacacttctctgagctcttgccagcacttgatattatattgttattgccttccaatctgttaatcatttctttttccttctttttaccctttttgcttggaaatatcttccctagcccaagatcaaataaacgataacttttctcatttaaaaaaataattatttaatcagtctagaatttggtttttgatataagaatcgtgatgattgtatgatattctgcccaccaaccagagcagtgctggagaggtgcagagatggcctcctgtttcctgtttcctccaagttctgggtctgtgatttagggatctgctgctgagagaggttcaaaacatcttccccaccttatttcatggactgtcattgtttcaagaagcaaattataccatcagctccaggaagattttctccactgcttcatctgttttaagatcagtccattgcaacctgattctgcattctgccatctgatgggcttcgtggtgggtcatgtgaggagtttctatttttgtctgtgttctaaatttgcaggtattttattgaaagtataaaagtaattttaatagaagttactagccaggctttgcattaggttttaatatcttgtagaataagaataagattattttctctttttttgctttaagattcctcattacactttttttttttttttttttgagacggagtctcgctctgtcacccaggctggagtgcagtggcaccatctcagcccactgcaagctccgcctcccaggttcacgccattctcctgcctcagcctcctgagtagctgggactacaggcacccgccaccatgcccctcctcccaaagtgctgggattacaggcgtgagccactgcgcccggcctagattcctcattactcttttgcattatgtttaatctcccatgtggccctttttgaagttcttccctagtcactcatctctctcttttattatatttatatatttattatattcatttattaattattttgattggcatttgcattatatgtattaacgagaagtaattttgcatcttaaaaatgtcttattttttcctcatcataaaattacatgttcattacagaagatttagaaaatacagaaaagtataaaaaagaaaagtattacctttaatcttaccacttggaggaaaaaaactgcaaacattttgctgtctgtcctttcagattttttcttagtttatacatgtttgagcatgcataaaacttgcattgatatgattatgatatttcatcttcctatccagaagaatagagtatgtctttctacattccattacaaagaaccagttggattcatttatttattccactgttaatctgttttgattaattcttgtctcctacttcttggacatttctttgatttctcactagtttcttgagtaaaattgtttgttcgtttcactttcttctttcttgattgataatgaaagcatttaaagatatgaatttgacttttcttgtggctttggctaaatagagacaataaaatctagaaacttctgaaataaattaaacctaatttagagaaaaaaggaaagtgtacattttccatagagtacaaggcacaacataaatgtttaaaattaagctgttattaatattataaaatcaagttactattcatatatcaatatcttattgcatgctagctagaattatcaaatactaacagcaggacaaaaaagtcctcactagtaattttaggtgagagtttgaggtaaagatgtgggcatgatatcacatagggttgctttcatatctatcaagaccttaggtctgtgattttgtgctttcttatatgcacagaaactgatttgtaattgcagtgaacttgtaacatactaaccctcctgcctttttacattaccatagaaaatgcaaaacccaaacctcctaatcaaactgatagcttcttttatctctacctcagaatatcaactataatgatatatataattttgggtctgccacagggacagagtcctcatggagaacctctgctagagcagggtagaagtgaaatgtggggttggagcccccatacagggtctccgctggggcactgcctagcagagctgtgagaagagggccaccatcctccagactcctgaatggtagatccatcaacagctgtaccatgtgcctggaaaagctgcagtcactcagtgccagcctgtaaaaacagccaaaggggctatgccagcagtgccgcagggacagagctgcccaaggccttgggagcacacatcagaatgccctggatgtgagatatggagtcaaaggagataatgttggagctttaagatttaatgactcccctaccagattctggacttgcatgaggcccattggcccctttgttttggccaatttctcccgtttggaatgggaacatttacccaatgcctgtacccgcattgcatcttggaagtcactaacttgcttttgattttacaggctcgtaagtggaagggacttgccttgtctcagatgagactttgaacttggacttttgggttaatgctggaatgagttaagactttgggggactgttgggaagacataattggttttgaaatgtgaaaagggcatgagatttgggagggaccagtgtcagaatgatatggtttggctctgtgtccccaaccaaatctcatcttgaattttaatccccatgtgtcaagggagggacctggtgggaggtgattggatcatgggggtggtttgcctcatgctcttctcatgatagtaagtgagttttcatgaggtctgatggattcataagtggcagtttcccctgctctcccctctctcctgctgccttgtgaagaaattgcctgcttcccctttgccttccatcatgattgtaagtttcctgaggccttcgtagccatgcagaactgtgagccaattaaacctcttttgcttatatatcacccagtctcaggtattctttagagcagtgtgaaaatgaactagtatacgtgaattcaaatgataatacttaagagactcatgtccaaaagataacaggagcagttttagaacaaaactataatgaaggatctaaagtgctgtactgggttctcttgacttacccagtgtgcaatgttatgaccttgggcaggcccgtttacactgtgcaatgtggaattcaaatgcgatggtggatggaaccttgtcctgaacctaattccatgggaagcatttaacatttcatcatgacatatgtttgttgtaggcatttggtacataccttttattacctcatggaagtattctgctaagaggggtctggtttgtctgtggtttttggtttgtttgcttgcttgttttttagagagacagggtctcattctgtcacctcagctggaattcagtgttgtgatcctcacccactgcagccttcaactcctgagttcaagcgatcctcccacctcagcctcttgagtagctgggactgcaggcacatgccaccatgcctgttaaattttttaattttttttttcagaatgggggtctcactccattgcccaagctggtctcaaactgttagcctctagtgatcctcccaccttgggctcccaaagagctgggattacaggtgtgagccactgtacccaggcaaaagataactttggaacaccacctgagaatgttacttacaatgaatcctgtcctcattctcatttacttatttggatggagtttcctgaaatttgtctcactatcatctaggatcctttttctttctccaactgggagattgtgtctggtttggaaactgcaagccctgttcaggaaaagggaaaagacccaaggcacacacccagtccccaggtgatcatcaggcccaggtgaaaactcaggccttaggtgcacctctggcctcaggtggacacccaggccccaggtgatcaccagtccccaggtggacacaaggccttaggtgaacaacaagacccagtaggccatcaggccccagctggatacagtccccaggtgaacacaaggcccccagagggacataggccaaggcagtcatcaggccctaggtggacatcaggcctgaggacgacatctggcccctggtgaacatcaggcacaggtgtccaagcagaccctgggtggacataactgtgtacgggtcaggagatgacctgaggggagggtgagtagtcagcagcccagtggagtcctgagtaggtcttatggaaggaaggggcctaggggacagaaccgtaaagaagcgacctcacttcctcgatgatgacacacacgaacagaacttagaactctggtaaccaggcacccatatcctagagtcagcgctgtaaccagctcactttgtgggagacgctcaagagagcaagatgttctcgtgttgcttccccacttcgagaggttgctgcttcaggaatggagggagtgagagccttttccgacaatgccgaagaaggctcatccctcaccccagacgcctgtggccctttgtaagaaggcgcacccaggtaccacaggacagcccggggcaggccctagctggccaggccacaccatagatcccatcggggctgcctctgtacattgtccttgtccaggaggagattcgggagcccatggaggcacagacacatggtgaggtggctgcagcctggaagactttgcgggggcagtgcttttggggtggaattcctttgaattcagtgaggttgtctctgtgtttggaaattccagtggaaagtgactgatgctggtgaccctttctcctttttcagctcctggtccatacgcagacatagcagcacttgcggcaccggctgtcgagccaaagccagcatgggaagagccccctccagagagagcgctggaggtggagggagctccagccaaggaccagcccagccaggagctgcctgaaatcatggcacctactgtagccactggccttaatgctggagctgaaaacgtggctggagagagaagtgggagggagggggtgacaagcacagccccagccagcagatcccatgctgcccctagtcctgggcatggtggcaaacatggaggcggagaccagggcattcagactggactcctgtacctcgctggagagaggcttctctcattcactagaaccacagccctgctgctgcagggcctgtttattgtgctaatgctggtggggtatatctctgtgcaggtggtgctcaagagcattaaaacaaggctgggaagaagagttccagcagctcctcctgctctcagacgcaatcttctcctccaggcatggatgtgtgtctgcaactgggcatccaggctgtttgccccctaatgtgctgccccgaacgggctcttaacaggtgggcaggggttgaggggaccaggaggtggctccaaagggtacagcaaggaaagcttttaaagacagctgttgtgctccaggctctccatgccaccacctgccctagcatttattaatagtgttagaattacaagtttatgaaatgaaatataaataaagtttgatttctgaaacttctcacctttttgaactccctaatgttagatggtgtttttgaggctatcctgaaaatctcggatagttgtgtcttttgttgtggttgtttgtgtggctgaattaccatcgagtcatctgttattggaaacttttcaggtatggcttttagaagaccttgacccactcttgcctgttttgactctctggtttattgtggaaagagggatgatgtaggctcatgtctccggcagatcaatcaccttttgccatcaaggatttggcatcagagtttccaagaattatgtgtgcaaattgacatgctggtactttagctaatctgggtgtcaaaacagaatgccatagactaggtgtagcatagaaaattgatttctcacagttctggagatggtaaaatccaaggtcaaatggtcagcagattccgtgtctgcagagggctggcttcctggttcatagacagccatctttttactgtgtctttacatgacagaaggggtgagggagctctctgcagtccctttgatagggacaccaattccattcatgaggtccctgccttcatgaactgaatcaccttccaaggccccacccccaaataccatcacatagaatccaatgcatgaatttgaggaggacaataacatttgctttatagaatcaggtcaccccgagccatatgcactcacaggaaatctataatcttctattaagtatttgctggtcccctctggggattgtctaaacagaattgtctaaacaaaaatttagacaatttttgttttctttaagaaaaatgctctttcatgtgatccatggtttattcatagaaagcactgtgagttcacacacttgctaaaaagaaggacaattgcgatacaaaaatgagagtgacctccctctctctctctctctctttttaaccaaccaactgggctgagacattgtagggacccttggctgggcagtaggacttgagtagctacatacggcaaatacaacttcttgctcagtttggagtagaaaaggtgacagtttgtcaacaaaagaaaaagtaaagcagatggagaagttcttagttcgcattctagctataccacctcttccttatcaaagcccacccccacctcaggatctaacatgtaaaagagtaaacacaaaggcactggtaaccaactgactcttctgaatgcccttgctatctcctacaacaattccaggctgagcataggggtcaggaaggtagcaggaacatgatgatacactgtggaggtcagccagggctaagacagggctgctcattagggctagaaattaagaagggagaggctaagtgcagaccagccctagcctccaagtcagcatgcaatgagactgtgacaaaagcaggcagaggaagcttgacgtagaaaggcaggggaagaaagcaagtacggggcgagaagggaaatgtgcagtgaaagcagccaatctgatggcagagggagaccggtgcttagaagcttgtttggtgagagggaatgaatagaggaggcacagaaatggggaacaaacatttaactagtgagagagatttaagacgaatgggaagagaaatctcgcaaaaaggacacattcatgcagatcctcaaagatggacacgcagtcatccctacatgtagaaatatgctcagttacacatataaaaacacagatgcatggagagcaagcatacacacagacacatatctctacacatgcactcctgtgtgcccagatacacacacactagacatgcaaaacatgacagcatttacacatagatatgcaccctcacatgtgtgcaaatgttacatcctcacacagagacccacattccagtgtgcacatatccacacaggtacacagccatagaactgacatacgtacacatcaacatataatgtgcacatacagacaggcacgcgcagatatatctatgcacatagacacatgtactcagtcatgcacatacacacactctctaacacaaaggtgaccagtgtagatgaatattgtgagctcagtggcttcccagaccttcatcttttccctgctcttgtttcaaaggtgctcagcagactcctggcgaggctgtgtgaggcaggggcaggaccttcagagtcctcacagctttgtgaggcaaaagtctgagtccagtcctggcctctgccgctcacccaccactgggctattaatgccctgtctgtaggcgagagattctgcatagactagtcttgggatttttttctaactggccatttttctccttggcacacccactatcccgctggtaacggcacacactctgcaagggaaacctgagaaatggttgtgagtctcctcggacaataagcataccctcccacccacagctacctcaagtgcccagcaaatcagaaccaaaattataaatacttacgactttacagtaattggcaacacatatactatagtacttacagtaccataaatgcatctgtttctctggtgaagcaatctctgagatggaacagtgttctgtgtttgccaagggagacagggccaatgcccaggacactcaggacgtaggggcagaaggtggcatatcgtgggggtttctggtggatctgcaaggcccagcttctccacaaacagtgggctgtagtgagaagcttgccaaggtatgcatatcgactggagttggactctccccatccttagccctgtggtcctttggcctcagccacaggtgctcagatcctcccagggtggacaaatgtttcagtgtttttggcctgacctgatactacctggggacccaggctgccgggccagtgagctatctgctttctcagccaaagggctctcgaaccagcagcatcagctttttcttgcctttgtagatcgtttgtggttgttgatgaacagggcaaattgcaggtagccatcctaaggcagcaggagggtctcccgagccttgcttagaaactcaatgaactgtccacactggcaatggctaatgtgtgttaggtgtagtgtgtggtgttgatgtaagcattgcatcagcaactggtgccatggagctctgtcagtggagatgagctttccagagctgtggtggcccggggtgccggccaggccaggtgcagtcaccgtgcagcctcgcacacaggatgtctgaaagcaccatggcaatgtgcgcactcttcaccaccagggggatgagaactgccagctcattcttgcccagagagtggctgagggcacaaacccagagcacatcactgatggctgggtgggtatcctggttatgagccaggtgaagatggctcatggccaatgagaccagctggaaggcgtggagcatgtagccccggagctccacgtagcaggcaatggtgaacagctgtgaatgggtcatgccaccggcagcagcctcggtggcaatctggcaggctgcctcaaaggcaatgtggtctttctcacagagtgtaagggctgacagggcacagctctgtggatgcttcgtagcacactgcagggccagtgtgcaagcacagctagccagttcctcccgctgtggatagtcaagactgaggcgcaggatagtggtgtgggatacggctgtggcagctacaatactagcagcctcagtaggggtgaagagtgtgtgccagctctgcaagatgctccctgaggcccacacacctgtcggggagagcctgagctcagccgtggccatctcagtcctgattcaggtcagcccagattaccgtgtggggtttgaacttggcctgcagagatgagttctccctcctcctcagcaaccttgacacgatctgaggcaaaccagggcaagagaagcatcccagatggccaaaccttgtttggggtctcttcctatcccttccttacccaggtcagagggttgaaggtttctgcaggtgctctcagcccctcacaaggatggagcagtagatcctggggtttgcttaacccgaggccagggttgcagatctgccaggggttctagctgaagtggggcctgtcagggtagagtcttgtgctggggctttgggctttagaaagggtcctgagcctccaaggtgtctggagtttctcacaagcatggacagggacagggaccaaaccaccaggcccactacctcccaagggcacacttgagtattggcagctgaaaattcattctcttagacatgtctctgatgagagggtcaaagtgctgctgacatcgcatgtggttggtttaagcagtgaggacagaacttgggctggctgaacagaggctatcttctcccaccagcagccgcatcctttcttaggccatcaggaataggaatatgagagctccaaggattcgttgtcctgtcccaagagtagggtatagaaactcctttcccgtgggagtagagggaggtgggcgatacccacttctgtagcacaggtcaccaaccatcgtaccatctctccgcgtctccagttaagggatgataaggtcatcgcatcacctgtaacccagtttccagcgccacgttgagcagggtgctgtcagtactactgttagtgggagtagcaatcttgaacgcattttgggccagtttgaagatgagcggggaagaacgaatgtgcttctgcattgcttccagaattgttcagagcctcagagtgtctcctttggcagcagtcagcatggtggaggccagttcccaccgctgtgattccaagtgtccaagcgagaaccagggaggataatggctgggcaccagagacaccatacagtgagtgagggatgtgtggcctgcacaacctgaattttctaaaacaggtaaccttatacacgtaagcctaatttataggcagggtctggatcacgagacagcagagctgagaacaaatacttggcagaggtatgcatggaaacgctctctcggtggatgacttctcccagatccctgaaagggcccccttccagcagcaagatgcgctatttttggagtgtttgcactgggtcatcatccaattgcagctcttggagttggctgaggagctgctcctcattacggcacaccttgtcctgtgcataggagccttcaggcattaccctctgtgacccaggcccatcgatgcagcctccagggccaatgacaagtaggactcactgctgtttggggagcttacagccacaggtacatgttggtacacagggggtctgctttcattcgtctctagatacctgtcatcattcaggaggcaggcctcagtcaaagtgagaaacaggcagccgatgggatccagggggtggcccacccagccttccaggtttgtgatggttgtggttcctctctgcagcacttctttcttctgatgcttgtagattttcagttgccaccgctgctgaacctcagagtattaataatggccactgtgagtctgagggcctcttttggataaccatgggaatgtggggcatcaacccgagcacaggctgttgcacatgctcaaaccacagtggctggccttgggaattaaagagtagtcttggccaggcatggtggctcatgactgtaatcccagcattttgggaggccgaggtgggcggatcatgaggtcaggagatcaagaccaacctggccaacgtggagaaaccccgtctctgctaaaaatacaaacaatttagctgggcgtggtggcgggcccctatagtcccagctactcgggaggctgaggcaagagaatggcgtgaacccgggaagcggagcttgcagtgagccgagatggtgccattgcactctagcctgggcgacagagtgagactccgtctcaaaaaaaaaaaaaaaataaaataattagctgggcatggcggcacgtgcctgtaatcccagctattcgggaggctgaggcaagagaattgcttgaactcgggaggtggaggttgcagtgggcccagatcgcaccactgcactccagcctggcaacagagctactagactgtctcaaaaaaaaaaatattgcacagatccctgaaaatacaattatatagatattcttttttgttttgttttgttttggcttggttttttgagatgaagtttcgctcttgcgcccagcctggagcagtggcgcgttctcggctcactgcaacatccacctcccgggtggattctcccacctcagcctttcaaccaagaagctactttttgtttgtttgtttggttggttggttggttggttggttggttggttggttggttgttgagacagagctttgctcttgtcgcccaggcgggagtgcaatggtaagttctcggctcactgcaacatccgactccaggcttcaagcgattctcccgcctcagcctcccgagtagctgggattacaggctcccaccagcaagcccggctaatttttttgtatttttagtagagacaggttttcatgatgttagccaggctggtctcaaactcctgacctcaagtgatctgcccgccttggcctcccaaagtgctgggattgcaagcatgagccaccgtgcccagcctgattatatacattttcaataaacatatatgaaaatggtctcaggcattttaataattagaagaccaaaatcaataaaaatgtaataacattacccactaaccagaatatataaaagaaagactgacaaaatcaggtattggaaaggacatctaattagaatgctcttaaacttgtggttgggttgtatattagtcaaaaaaatctttggaattaaaaaaattaattgataaattgtgtgtatttgtggtgtaccacattatacatatatacacacacagagacacgccttgtagaatagttaaatctgtgtatatatatatagccacagacatacattatagaatggctaaatcaactgacatagcatatcagttagcttagatacttatattttttttttaatttttttatttttagatggagtctcccactgtcacccaggctagagtgcaatggtgcaatctcggctcactgcaacctctgcctcccaggttcaagcgattctcctgtctcagcctcctgagtggctgggataacaggcgcctgccaccacgctcgactaatttttgtatttttagtagagatggggtttcaccatcttggcaagcttctgacctcgtgatgcacccacctcggcctcccaaagtgctgggattacaggcatgagccactgtgcctggccaatcaatacttatttttgtgtgtgtgtttggtgagaacatttaaaatctgctgtcttagcaatttcaaatattaccacttttttttttttttttttgagacggaggctcactctgtctcccaggttggagtgcagtgtcacaatctcggctcactgtaagctccgcttcccaggttcacgccattctcctccctcagccttccgagtagctgggactacaggagcccaccaccacgcctggctaattttttgtatttttagtagagacggggtttcactgtgttagccaggatggtctcgatctcctgacctcgtgatccacccgcctcggcctcccagagcctgggattacaggcatgagccaccgcacccggccaccacattgttattaactatagtcaacatgttgtacaatagagctcttgagctttttcctcctagttgacattttcagtgacatgcactgcatttgaacacatgcagttactatgaccaagcgattttatctgtagggctgtacttaactaaaatatacatgtgtaccaaaagaaattaacaagaatgttcgtagtggctttattgctaacagccccaaactggaaacaaaccaatgtccatcaacagtagaattaatagatgtgccatattcattcagagcaccaccgagcagggaatagaaatgaactgcttcatgaaaccacatgaaggagtgtcacaaatgtaatgctgggccaaagaagccacacacaaaaccattcctactgaatggccctccatgcatccatttatgaaacaagcaacactaattggggctgctaaaatccaggtgactctttgctttgacaagacaggtgggcagtggttagggagcagaccttcaggagagggatttccagattgttatttttatttcattttcttggactgtgtggtagctccaagcatgtgtcctctttgtgataaattactgagcagtagaataacaggatacctgtgtatattatactttagtaaatgtatttgaattcatttttgccattaggacaaaaatatattatatctgtgaattttaagtatatatttattaaatattgacaaatgtatgtcagtgtaatacaaatctctatgaatatctacaatatttgtccacatatgttttgtcttatcccctctctttttttcttctgggattccaattaggtataatagatatatgttggaccttttgatatggttctgtgggtctctgagactatcttttttcaagtatcttttttctctcttctttaaattcaataatactgatcttttttcaagttcactgtctcttcttctgttatcttcattctgcagttaaacctattgatgaattttttaatttagacattgcattttttttagttctagagtttatagttcattgctatagttttcctctactgcaatttctgatttttacattattgcaaacctagatagattcggcctttaaccacatagattctgccattaacattacttactacacttgctttatcaaatatccatcctcctatccattcttctatccattattaatcctccttttggggggaatgaatttcagagtaaattgaagacaccaataaatatttccttctgaatacttaaacatatatatcatttattggacttcaatgatctctttacagttttcttctgacatcaattttatgcacaatgagctccccaagtgaatatttgttgaattttgtgtatatttgtgaattttaagtgtatatttattaaatattgacatatgtatgttggtgtaatacaaatctctatgaagatctacagtatttgtccacatgtattttgtcttatcccctctcttttcttcttctgggattccaattaggtataataggtatatgttggaccttttgatatggttctgtgggtctctgagacaattttttttctagtatcttttttctctcttctttagggtcaataatattgatcttttttcaagttcactgtctcttcttctgttatcttcattctgcagttaagcctagtgatgaattttttatttagacattgcattttttagttctagagtttacagttcattgttatagttttcctctactgcaatctctgatttttacattattgtaaacctattttctttcatgtatgtgagctttaaaatctttgtctgctaatttcagcatttaggtcatctgggtttggattctgtggatagtcttttttcttgaaaagggatcacattttcttgtttctttgtatatggagtaatttggggttggattcttgatatcagtatcaaaaatattgaatgttacgttgtggaggctctaggttcagttacattcctctgagaaggttctttccttcctccctctcttctttcctccctcccttcctccttccctttctcctttccttcctgatatggtttggatatttgtcccctccaaatctcatgtgtttcccaatgttggaggtggggcctgatgggaggtgattggatcacagggcagatccctcatgaatgacttagcaccatcgccttgattcaaagtgagtttctcgctctgagttcctatgagatctggttttttaaaagagcatggcacctcccctgtgcatctcttgctcctgctgtgaccaggtgatgtgcctgctccccctttgactttggccacgagtgtaagcttcctgaggcccttacgagaagcagatgctggcactatgcttcctgtgcactctgcaaaactgtgagcaaatgaaaccacagttttttataaattacccagcttcaggtattcctttattgtgatgcaaacagactaacacaactctgtccccttctttcctttctttcttcctcccttctaccaaacaagtaagttggttggacttaaactacaaattttgtcttgggtggtagttcagagatcagccagatatttgaacaggctttatttacagaatttgggaatctctcctttccaggaatccccaccttacttttctgcagctctgatttccctgaactctacgctgtggttcttcaggccagaaagactgagttttctattggagctttatataccctgtgtggtgccaactttgatgtgtactcaggctaaaagtcagtaaaaatacataactcactttgtgccattacctttttcccaagagtcaactcctgtccggatctgtattacttttctttactcttccttgcctaaaggatttttatttgcttgttttgttttagttttggtctagagtttattgttatctccaagagagttgggtctggcaggagtgattatcttttttaatttcaattttaattttaattttaatttttttgttttgagacagagttttgctttgtcactcaggctggagtgccgtggcatggtctgcgctccctgcaatttctacctcctgggttcaaagaattctcgtgcctcagcctcctgagtagctgggacaacagccacgcaccaccatccccagataatttttgtaatttttaagagtagagatgaggtttcaccatgttggccaggctggtgtcaaatttctgtcctcaagcagctcacttgccttggcttcctaaagtgctgggattacagatgtgaaccactgcgcccagccaaattttaattacttaaagaaagaagaaaatatgaacccagtgtctggcctaccatcttattttgtgcatatcaatagtacttctcaaaaaatagtttttgaaagttctggctcacagaatgcccaatcaattgatctttgtctttttttcatacttgttaacaatgttgggatcaaaccatgcagtcttataatctgttttatccacataatatattgtgaccatttcatgtttgttgctttttgatgacttcatagtatttcttcatatggatataccataattcatacaacaaattttctatttttaggtaattttgagtttttaatgtattattatcagaaaaaaggtaataaatatcttcctggcaatatgtgatagcttttcttatgtccttcatgttgcactcactaaaaagcattgccttttaagttgaatgagggagaaactggttaactcttaaatcataggttatatattagagagaaaattacttttattagagtcaagaaagtaaggtggtacctcattataaagaagctaaatacgtgtatgtatgtatgcatatgtgaataatgggttgagatagagaagattttgagaggatagggcagactgctatcaatgactaacattgtctttcaagaatagtcatgaatcatttaacaatggggatatgttctgagaaatgtgttgctaagctattccatcattgcatggacagtatagaggcacttaacacaaacctagatggtttagcctactaagcacttaggctatatggatatagcctaagctatcacatattgtagctcctaggctacaaacctatacagtatgttactatactgaatactgtaggcagttataacacaatggaaagtgttagtgtatctaaatatatctcaacatagaaaaggtacagtaaaaatatggtataaaagatgatacaccttctattactctgttttcacactgtggataaagacatggctgagactgggtaatttatgatgaaaagaggtttaatgggttcacagttccatgtggctggagaggtctcacaaacatggtggaaggcgaaaggcacatctgacatggcagcaggtgagagagaatgagagtgaagacaaaggggaagccccttataaaaccatcagatcttgtgagacttattcactactacaagaacagtatggggaaaactgcccccgtgactcggttatctcctaccacgtccctcccacaacatgtgggaattctgggagcaacaattcaagatgagatttgggtggggacacagccaaaccatatcattcttccccagtccctcccaaatctcatgtcctcacttttgaaaaccaatcatgccttcccaacagtcccccaaagtcttaactcatttcatcattaacttaaaagtcctcagtccaaagtctcatctgagacaaggcaagtcccttccacctatgagcctgcaaaatcaaaagtgagttagttacttcctagatacagagggggtaaaggcattggataaatacaccattccaaatgggagaaattggccaaaatgaaggggctaaaggcctcatgcatgtccgaagtccaggggggcagtcaaatcttttttttttttttttttttttttttttgtgagatggagtctcactctgtcacccaggctggagtgcagtggtgcgatctcggctcactgcaagctccatctcccaggttcacgccattctcctgcctcagcctcctgagtagctgggactacaggtgcccaccaccacacctggctaattttttgtatttttagtagagacagggtttcactgtgttagccaggatggtctcaatcccctgacctcgtgatccacctgcctcagcctcccaaagtgctgggattacaggtttgagccagggcagccaaatcttaaagcaccaaattcatctcctttgactccatatcttgcatccaggtcacactgatgcaagaggtgcgttttcatggtcttgggcagctccacccacgtggctttgctcctggttgctttcacgggctggcgttgagtctctgcggcttttccagatgcacggtgcaagctgttggtggatctaccattctggggtctggaagatggtggctctcacagctccactaaggcagtgccccagtggggactctgtgtttggtcttcaacctcacctttcccttttgcactgccctagcagaagttctctatgaggcccctacccctgcagcaaacatctgcctggacatccaggcatttccacacattctctgaaatctaagcagaggttcccaaacctcaatttttgacttctgtgtacccacaggctcaacaccacatggaaggtgctaaggcttggggcttgcaccctctgaagccatggtccaagccataccttggcctcttttgtccatggctagagtggctgagatgtccctaggctgcacacagcaggggggccctgggcccagcccacagacccattttttcctcctaggcctctgggcccatgatgggagtggctgctgcaaagttcttcgacatgccctggagacattttccccattgtcctgttgattaacatttggctccttgtcacttatgcaaatttctgcagctggcttgaatttctcctcagaaaatgggttttttttttttctattgcattgtcaggctgcaaattttttgaacttctgtcccctgtttctgttttaaaactgagtgcttttaacagcacccaaatcacctcttgaatgctttgttgcttagaaatttcttctgccagacgccctcaattatctccctcaagttcaaggttccacaaatttctagggcagggacaaaatgccaccagtctctttgctaaaacatagcaagagttgcttttacttcatgtcccaacaagttccttatctccgcctaagatcacctcagcctggattatattgtccacatgattatcagcattttggtcaaagccattcagcaagtctctaggaagttctaaactttcccacatcttcctgtcttcttctgagccctccaaacagttccagattcagcctgttatccagttccaaaatcactttcacattttgggtatctttatatcagcactccactcctggcaccaatttactgtattactcctttttcatgatgctgataaagacatatctgggactggataatttatgatgcaaaagacgtttcatggactcacggttccacttggctggggaggcctcacaatcatggcagaaggtgaaaggcacatcttacatggtggcaggcaagagagaatgagagccaagtgaaaggggataccccttataaaaccatcagatcgtgtgagacttattcattaccacaagaacagtgtaggggaaactgcctccatgattcaattttctcccactggctcctcccacaacacttgggaattatggcagccacagttgaagatgagatttgggtaggaacacagtcaaaccatatcacacctgttttgggcatttaccatgaatggagcttgcagggcagtaagttgttttgggtgagtcagtgagtaagtaatgagtgaatgtgaagcctaggacatcactgtatatatactattgtggactttataaacactctatacttaggatacactaaatttactgaatatatttttgttccttcaataataaatcttagcttactgtaacttttttactttataatcttttaaatattcttaaacttttagactcttttgtaataacacttggcttaaaacaccaaacaacagtgtatagctatccaaaaataatttatgtccttactgtataagcttttttctattaaaaagttcttttttttactttttaaacttttttgttaaaaactaagacccaaacatacacattagcctaggcctacatatcttgatgacaaccatcgcgatgtcactaggcgataggaacttttcagcttcattatattcatatggcaccactgtcgtatatgtggtccatagttaaccacaacattgttatatggagaattatgataatttaaacctttgaagaatttagttttatgtctatatattattcccaatgtgatcactaaccttgaaaggaatttgagctatgttttatcatttttaaattatgagacacaatacacatagaaaaatccacaaaacaaaaatatacagctcagtaatttattacaaagcggaacacctgtgtaggtatcacctaggtaaagaaagagtattactagtaacccaatagcctctctctttttctttgcctttcagtcattctagagtaatcagtatcacaattgttataatcataactctcttgcttttcttcaaccaccaccctgacttctgtctccataaacgacttttgcctggttttttttttttttttttgagacggagtctcgctctgtcgcccaggctggagtgcagtggtgcaatctctgctcactgcaagctccgcctcccgggttcatgccattctcctgcctcagcctctggagcagctgggactacaggcgcctgccaccaagcccggctaattttttttgtacttttagtagagacggggtttcaccctgttagccctgttagccaggatggtctcaatctcctgacctcgtgatccacccgcctcggcctcccaaagtgctgggattgctggcgtgagccacagcgcccggcctgcttttcttacttcttaccacttaagcgcatatccctgaatgttgtagtttaagtttttctgttttctgaactttatataaaataaacaacatattcagtctatgtcttccgtttatgggtttttttcattcaacattatgtttttgagattgattcaagtaattgtcagtagttctagtttgtttctatacctgtacagtaagtgtatattacaatttttcctgtggtgtacaatgacgtggtgtacagtagtgtttctgtatggcatactgtaaggtatttttatgtagtaagtatatacgactacttattttactgttgataggatttggggtttttttctaatttgggggctactatgggtaagaacacttatgaacattcttatatatatctcctggtgcacatgtacaagtatttccattgtgtatatgttcacaatggcttggtgagtcatagagtataaatatcttgagctttagtagaaattgccaaactcttttccatagtgattattatcaattcacatttccactagcagagtatgattgtttacattcctgtacttttttgccaacacttgctattttcagtctttgtagttttaaccattctggtgagtatatagtgatatttccttgggttttcgacttttttctcatgactaatgagattgatagtctctcttctgaagtgcctgtttaagtcttaagccaatttatatataggctggtctgtctttttcttattgatttgtaggagttccttatgtattctggatatgagccctttatggccataccaccctgaatgtgtctgatttcagaagctaagcagggtctagcctggttagtacttggatgcatatgagcccttcatcagttacgcttgttgctctatcttctttccctctgtgggttaacttaaatagtcttttggcaaatgcgaattttaaactttcacgtagttcagtttattaaaatatttctatgattagcccaggtgctcatgcctgtaatcccagcactttgggagaccaaggcagatggatcacttgaggtcaggcgttcaagaccaggctggccaacatggtgaaaccccgtttctactaaaaatacaaaaacttagccaggcaaggtggcgggcacctgtaatcccagttactcgggaggctgcagcaggagaatcgcttgaacccagaaggcagaggttgcagtgagccgagattgtgccactgcactccagcctgggcaacagagtgcctccatctcaaaaaaaaaaaaaccaattttatatatatatatataaaattaatgctttctatttccacttaagaagtgcttcccttgccccgccccgccgcgggacttggggcggcgctctacttctgcggagaaggatcgacgagctttccggagaaagatccgcgagctttccggagccggagccggggcgagcagccaaaaggcccgcggagtcccgctgggccgccccggagcagctgaaccgggggccgcacctgccaggccgacgggtctggcccagactggcgccgaggggttcgaggggttcgtgtgctgtggagacgcagaggatccaggcggtgcggtctgagtgaaagccaatggaaaaagtgtgacatttagaagcagaagacttagcttcaaatccctactctttcacttactaattttgtgatttggaaatatctgcgcaagatgttgacgttgcagacttggctagtgccagctttattttcctcaccactgaatctataggtgaacttctagatccatgtggttatatcagtcccgaatctccagttgtacaacttcattctaatttcactgcagtttgtgtgctaaaggaaaaatgtatggattattttcatgtaaatgctaatgacattgtctggaaaacaaaccattttgctattcttaaggagcaatatattatcataaacagaacagcatccagtgtcacctttacacatatagcttcattaaatattcaactcccttgcaacattcttacattcggacagcttgaacagaatgtttatggaatcacaataatttcaggcttgcctccagaaaaacctaaaaatttgagttgcattgtgaatgagggaaacaaaatgaggtgtgagtgggatcgtggaagggaaacacacttggagacaaacttcactttaaactctgaatgggcaacacacaagtttgctgattgcaaccaaaatgtgacacccccacctcatgcaccattgattattctactgtgtattttgtcaacattgaagtctgggtagaagcagagaatgcccttgggaaggctacatcagatcatatcaattttgatgctgtatataaagtgaagcctaatctgccacataatttatcagtgatcaactcagaggaactgtctagtatcttaaactgtttgcttagcattcctattgacaacttttctgggagtgctgttctgctttaataagcgagacctaattaaaaaacacatctggcctaacgttccagatccttcaaagagtcatattgcccagtggtcacctcacactccttcaaggcacaattttaatgcaaaagatcaaatgtattcagatggcaatttcactgatgtaggtgttgtggaaatagaagcaaatgacaaaaagccttttgcagaagatctgaaatcattagacctgttcaaaaaggaaaaaattaatactgaaggacacggcagtggtattgggggggtctttatgcatgtcatcttctaggccaagcatttctagcagtgatgaaaatgaatcttcacacaacacttcgaacactgtccagtattctgctgtggtacacagtggctacagacaccaagttccatcagtccaggtcttctcaagatccaagtccacccagcccttgttagattcagaggagaggccaaaagatctacaattagtagatcatgcagatggcggtgatggcattttgcccaggcaacactacttcaaacagaactgcagtcagcatgaatccagtccagatatttcacattttgaaaggtcaaagcaagtttcatcagtcaatgaggaagattttgttagacttaaacaacagatttcagatcatatttcacaatcctgtggatctgggcaaatgaaaatgtttcagaaagtttctgcagcagatagatacttttggtccaggtactgagggactagtagaaagatctgaaacagttgggatggaggctgtgattgatgaaggaatgcctaaaagttaccacagactgtacggcaaggcagctacatgcatcagtgaaggactagtagttcctgctacaacttcagcagtacctataaagtaaagctaaaattattttatctgtgaattcagattttaaaaagtcttcactctctgaagatgatcatttgtccttaaggacaaaaatgaactgaagtttcacatgagctatttccattccagaatatctgggattctactttaagcactacataaactgactttatcctcagattagctgaatgattttgtgctgtttcaggatgtttgcactgaagaaaaacagaaagcttatctgaaatttataaaactttttgttttgctacatagaaaacagaaggtatttaaataataagcagtgatatgcttagcgagcacagctatactgattttgattagaatagtcatcaaagtagcttagggacagttaatataaaagattagaggagcaaggtctagaccatctacttctgctaaaataatttaaaaagaggtccataggccctaactatatgagcccagcttttgtaatctgacaaaaaaaatgaggagcagcctcgtgtatatcaatgtacaaaatattccttaggtcccttccattggtggtgatgctgccagttattactggagaaaaggaattctagagctttaacttggcagattaaaagtactctttttttttttttttttgagtcggagtcttgcactgttgcccaggctggagtgaagtggcaaggtctctgctcactgcaagctctgcctcccgggttcacaccattctcctgcctcagcctccagagtaactgggactacaggcgcccaccaccatgcctggctaatgtttttgtatttttagtagagacggggtttcacagtgttagccaggatggtctcgatttcctgacctcgtgatctgcctcggcctcggcctcccaaagtgctgggattacaggcgtgagcccctgcacctggcctaaaagtactcattttttattcatcaataattagtaatctgactcgtttcaaaaatttgtttattattgacaacctctttgaagatccatttcacaaactcaacagagtgccacgattaagagctagggatcccccaaactacctcaagcatctaaaaaattgccattttttaaaggcttaaattgtagtagtaaagggggaaaaaacccataaatcatctaaaaaattgccatttttaaaggcttaaattgtgtgtgtgtacacacacacacacacacacacacacacacacacacatcattgacctttcttaagacttcagagggtggaacttccggatgtgaccacagagaggaagagaccgggaaggcggagcgcggccgccagcacccccgagccgccgccggacccccgccgccccgggccgccccccgccccccgcggtcccaggtctgtccgtctggggacggctcgattccccgcagagccgggggagggacgggggcgcccaggggagggggcctcgggcgccccgcccgcgcctgctgccccgtcccggcggtaatgcgctcccggccgtgacccccgctgggggcgggggccgggatccatgcgcggagcccccacccggcccggcgcctgcggctgacggcggcgggggttggggggcgcgcgtctggcctcctgcccaccccctggcgtcgacatcacgggccgtcgggggctgcgccctaccccgcggccaggctctggagggaccctggaggtgccgccggcctcagcccatggcccaaaggtacgatgagctgccgcactacccaggcatcgcggatggccccgcagccctggctggcttcccagaggcagtgcccgcggcaccagggccctatggccctcaccggcctccccagcccctacccccaggcttggacagcgacggcctgaagagggacaaggatgagatctatggacacccgctcttccccgtcttggccctggtctttgagaaatgtgaactggctacatgctctccccgtgatggggccggagctgggctggggacacccccgcggcggcgacgtctgctcctctgattccttcaacgaggacaacactgccttcgccaagcaggttcgctctgagaggcccttcttctcctccaacccagaactggacaatctgatgatccaggcaatccaagtgctgcggttccacctgctagagctggagaagggaaagatgcccatcgacctggtcatcgaggatcgggatggcggctgcagggaggacttcgaggactacccagcctcctgccccagcctcccagaccagaataatatatggattcgagaccatgaggatagcgggtctgtacatttggggaccccaggtccatccagcggggggctggcctcccagagtggggacaactccagtgaccaaggagtcgggctggacaccagcgtggcctctcccagttctggtggagaagatgaggacttggaccaggagccacggcgaaacaagaagagggggatcttccccaaggtggccaccaacatcatgcgagcctggttgttccagcacctctcacacccgtacccctcggaggagcagaagaaacagctggcgcaggacacggggcttaccatcctgcaagtcaacaactggttcattaatgcccggagacgcatcgtgcaacctatgatcgatcaatccaaccgcacagggcagggtgcagccttcagcccagagggccagcccatcgggggctataccgagacagagccacacgtggccttccgggctccagcatcagtggggatgagtttgaactcggaaggagaatggcattatctatagaggctgatgcgggagagacccagcctccggctgtgacccccagcctcacacctggctctggttcccgcctggtcctctggcttcaggatcccacctccaaaggcctctccgctcaacgcctacctccctagggccctgctgggacatgggggcctgagtgcccacccaaggggctctcaaggacaccggcaaggcctccaggctctgagccccgcttctgccttcacctctgcctgggacccgagctgggctcctgggccttggtccccagaagatggcagctagggcctcgccgcgaggacagagaagggacagggtggctgggcagtcagggaaggagggtcgcccggatccgacattttggagagattctttcaccctcctgtcccccccacctcccttctctaatttcttctttttttaatgataaagtcttaaaacacagaaaaaaaaaagacttcagagaattaggtagatgaagcactttatacagtatatatcttcagcttaaatttgttttgagtattttttttatttttaagtaggcaaagatttaaaattttttatttttagtaaatgtttgaagcaaactaaaaagacgtgggcaatatttaccaaaacaaaacagaacccaaaaaattgtacatcttgatcttagcaaatatccttattgtagagacacttaataaagagatggtattttaatatctgcagttctgaggtagggtgtaacttagttctacattgtgatttaggaatttttaaacctttcttcttcaggggagaagtgacccaggcctcgagtttagtgctaaagccactagtgtacttatgctgtcacctaaccaccacatgcgacatggaggcagaggctaaatataggggctttcttaagaaagtgagaggaaattagcaagcattattagtgtttgactactgctatcaagtgaattcaaaggaaacaggtttttatgccatatttaagttacagaaaccaggcatgcttagaatagtttctaaggtgacagagtgagactccatctcaaaaaaaaaaaaaaaaaaaagaatagtttctagaggttattggagaatagaaagctaagaaaacttggtatacatttacaattgaaatataattacactttttactctcagaatattattcagattagacttcctgtttatcttttatattcttgcattgatataatgcctgatccttcaaagttctttcacatattatatgatcttctttatgaaaaaaagtagatgctttattctgatatattcagtttcccactttaggcaaaagtggattaatagaatgatgaattcaaagtagatgaggaaaatcaggcacagagaagtaaaggtaggtacagacccaaattcacacaagataatgacatcaccagcgtttaagttgatcatcaaaggctgggctggatttgtcttgctgtatgtgtcaggaaatttatacctattacattttccattttctcaaaataagtcacatgattgtaatgtttagctgcaacttttctcctaataaatagtgtcatgaagaatgttatagtgcgaagtttgtacatttcagggtcagttatacaatgtgaactctttatctacgggaatgagaatggaggatcattgaaggccatgatataaacaaatttgcatgttgaagcctgtataaaacatggtacagtgagtgaatgcccccatccccaagaacactttatacatattaaatggatatatgattactgtgcaaaaattcattctggaaatgaacatatatttgagcactaatatgtaatgtacatcttctgccctaaggagaaaataaatcataaaacttgttttacattcaaaattactttcccgagcatgtcttagagtaatctacgtgttgatgtatgtaaattgtattttaggtaggcaaagaaacaagtctggttatttatgtaaaaactagtctaataaagtgagtggctttatcactttgaatctttagtgtctaaaagtggtgtttaaagtaatactagcacatcagaaaaccttgtgtggacaaaactagttcactcactgcttctgcaactgcagttcctccccttaggttataaaaaaaaaggacccaaatgttacatgtgttgatattatgacttgtcagttactgatgtctgtggtatcctaccctcgtctctgaaacggataatactgaataattattagaaaactacaagacttcacactttgtaccattaaaacctaaaattttaatcctatccttttttattacagatcaatcagcactcaggaacagagcagcaaggaaaaaaaggaaatttcattcatatgttctgtgttcatatctcttcagtacctaattgttcatttaatttcagccttattccttcataaggggttttaccacatgaagtcatccgatgaccctagctcttattgtgaagttgaagatgactggagtatacttacaaatgttacaacttaaaaatgttacaaaacatttattaaagctcatatttaaagtagagcatccagtttgagaagtagacatcaattattaaagatgtcttttttctccccatttaactagttaaaaccatgatgtgtaaatgtagaagtagaataatcatatggaattccctaaaatatttctgtttactaacatatattgaccaagtacatcaagcaggagagctcttccttcattctgttatagtccacatcattctaattttgctcagttgttattaaaagcatattcctaaaccatacacttttgtttcaataaagttttattttgttgggatgaataaaatatcaaagttataagctacatgagacaaaagttcaattgttcaaaaaatttactgggacagctttctattataggtattgttaaattatattgctctgataagattactttctttaaaaagtttgtacttttctgtaaattgaaagaatatggagtcataaaatggcaagtgttttagggttagcgtaaaattgggcattgtcattgatttcatagatgatataaactagcaggcttacagcctaattcttctttggactggtctttggcagcagttccttttcagactcaataaacagaattcagacagatgtaagtcaaaacaaaactttacaaagccaagtgtattatcttttgcattaacctattttttccatcatacatgctactagtatgtgcattagcatgatattctcatatacattgcattaaaaattaaaaggtagcagctcagggtgagctcttctgtcattcatttgttcctaaatttttaagggctttttctcagtcaatatttgtataaactgggtagtttaacttcattacccatttcattaaagttgatggattgtgatgagatgcatttaaggccaatagtgacagatttttttttaatctcttgaacacaagctttgaatgataactacaggttttaagtgctgttaacattaataccataatgtgatgtgttagaaccaaagggatattttaaaggtagatatctgaaaattctctagtctcaatgtatatatgtattgaatatactctaaaaataaatgtgcaatttgctagtaggacaatgcagtgattagcattaggtatgtttcttcttttatatcctagctatgtcccactttcttctaagtgcaatcctttcatgttcacttgttgttttaccccatctactctaacttcagttggaagccttgtctagagtatagtatgtgtttttacctttgcagtgaattgcatgtgctaattgtaaccacagctatttttatgttgacataactccaagtgttatattaaatgttctattttatattagctctaatcccttaagtaaattttaagaaataaattcttgttcaaaaaaaaaaaaaaaaaaagaagtgcttccttgtcctaaggtcatgacaactttcatgtaagttaacttaaatatggaagctttattggcttgcctttaacatttaatttagatctacaatgcccatggaactaattttttctgaatatgtttggttgaatgaaggcttttttttttttttttttttttttgagaaggagtctcgctctgtcgtgccaggctggagtgcagtggcgtgatcttggctcactccaagttccgcctcccaggttcacgccattctcctgcctcagcctcccgagtagctgggactacaggcgcccgccaccacgcccggctaattttttgtatttttagtagagatggggtttcaccgtgttagccaggatggtcttgatctcctgaactcgtgatccgcccgcctcagcctcccaaagtgctgggattacaggcatgagccaccgtgcccagccgaaggcttatttttttccatattgatatccagttgtcttatcactttttagtgaaaagaccatcctttcttgtgcagtgccaccttaactataaattaagtgttcataaaatgggtgtctatttctgggccttctcttctttgccattgatttctttttctattacttaccagtattctattaatatccagtagagcaaatctttcaatcttgtttttcttcttaaagattaagtttttggttattcttggtctttagtgtttccatataaatgtcatttattaagtatttttgcaatttgatttccaacttaattgctctgtagtaagaaaacatactttgtatgatttcagtccttttaaatttgagaggtttttagtgtatctcaacatgtggtaaattttaataaatattctgtgtcttcttgaaaaggatatatctccaaaaaaagttttaatttgaaagatgttctatatataagtagaaaaataagaggaaactcagatcacaaaatatagaaatgtctatggggcaaagaaaaatgccagaaacttaccaaactgtcttaagtgcaggcttcatcgctgatccctggcataatactccttcgcacagaactccataagtatgtgctgatgtttttaggtatcaaagtcatgtgacttagcattacttgagacaaaatatttttttcttttgccttgggtgtaccagctgttggctaataactccaagaataggatgttattaaactttagaaacatttgctttcaggatctgccagatcatcttttggagatcagaagcttgaactttccagttcatcccagcctggatccagttatgatgtatataacctgttctgtatgtatcagcacatttcacctgatttgagtctacgttttcctccctgctcagaagtgacgagactgtaaggatcaggtatgaaatttttttatgcttttcctctttgtgtttctctttaagaaatgtagaattcgggccgggcgcggtggctcacgcctgtaatcccagcactttgggaggccgaggtgggtggatcatgaggtcaggagatcgagaccatcctggctaacactgtgaaaccccgtctctactaaaaatacaaaaaattaaccgggcgtagtggcgggcgcctgtagtcccagctactcgggaggataaggcaggagaatggcgtgaacccgggaggcggagcttgcagtgagccgagatcaagccactgcactccagcctgggcgacagagccagactctgtctcaaaaaaaaaaagaaaagaaatgtagaattcgaatctaagatctgagaataaacaaatgattcttactattaaaggcaatttaaaaataagaaaaaagcaagcttcctaaatgttgtgataaatattatgacttccctgtagtgttatatctaacataaaaactgaaaggttaatgagttatgtctgtttgtagttctaaattccattgtagttttccttttttgaaagaagttttggttcaagagatcttttgtacagcatagggactataatagttaattatgacacattcttaaaaagtgccaagagtggatattaggtgttctcaaatcgctttttcttatcactcaaaagtggtaactgtgcagtaatacatttgtaaattagctagatttaatcattccacaatgtacacatactttaaaacatgttgtacacgatgaatacatacaataaaaaagaaattagctgcatgccagatacaagagaaaaaacatgaaaaagaaagaaattctgttttcaaattattttgtgttgttgttgttgttacagggtctcactttgtcccccaggctggagtgcagtggcgtgatctcacctcactgcagcatcaccctcccaggatcgagggattctcacaccttgggacccccaccccccagcagctgggactacaggcatgtgccacaggcacacgcctgagtaatttttttgtatttattgttgagacagggtttcaccatgttacccaggttgggctcgaagtcctgggctgaagcaattcccctgccttggtctcccaaattgctgggattacaagcgtgcaccactgcacccagcccagaatattttgcatacattttgcctgtcatttgtctatttataaattctacaacagatattcgtacatagatatgttgtacaaaacacaatattttttcatttcttctgtattcagtgaaaatgataaatttagaaactcatgatgtgattagaaatataaacaaagaaaatgcttaaatgattatcgaacttttttagtttcatatttgagactgtatgaattatagtctaccatgtttgcctgtgattcacaaaattctgtttttcaggatatatatatatatatatatcaaccactgaatttagtgtaaggtactgaaaataaagaagaaatacttatttaagggcctgccttgcgttcactactgcgctagcatatacatttaacatgcaaagttcctttcatcagagttcctacagtttagaagggaaactaaaattacagacgagaaatataggagcacatgggattcagtattgattttttatttttttattttttgagacagtcttgctctgttgccacgctggagtgcaatggcgcaatctcgactcactgcaacctccgtctccgggattcaagcgcttcccctgcctcagcctcccgaggagttgggactacaggcccgcaccaccacgcccggctaattttttgtgttttagtagagacggggtttcgccatgttggcccggatggtctcactctcctgacgtcgtcatccacccgcctcggcctctcaaagtgctaggattacaggcgtgagcaccgcgcccggcctcagtattgatttttttttttcatgtacaaattcacattttactctctcaagtattatccccatgattgatactcacatgtattttccctgaagtacttactgttctctgcattgaaataacaaggtaactacccctggagacctctctaaatgtcctagaagaggtaaagggtacaattagagtaatagaccatctattgccactgactaaggttgaagtcaaaattagcactcatctttatctgctccatccagtttgtttccaaaccttcaaagattttttctttttatttatttatttttatttatttatttattttattatactttaagttctagggtacatgtgcacaatgtgcaggtttgttacatatgtatacatgagccatgttggtgtgctgcacccattaactcatttacattaggtatatctcctaatgctatccctccccactcccccaccccacgacaggtcccggtgtgtggtgttccccaccctgtgtccaagtgttctcattgttcatttcccacctatgagtgagaacatgtggtgtttggttttctgtctttgcgatagtttgctcagaatgatggtttcgagcttcatccatgtccctacaaaggacatgaactcatcctttttatgactgcatagtattccatggtgtatatgtgccacattttcttaatccagtctatcattgatggacatttgggttggttccaagtctttgctattgtgagtagtgccgcaataaacatacgtgtgcatgtgtctttatagcagcatgatttataatcctttaggtatataccccttaaagggatggcttggtcaaatggtatttctagttctagatccttgaggaattgccacactgtcttccacaatggttgaactagtttatagtcccaccaacagtgtaaaagtgtttctatttctccatatcccctccagcacctgttgtttcctgactttttaatgatcgccactctaactggtgtgagatggtatctcattgtggttttgatttgcatttctctgatggccagtgatgatgagcattttttcatgtgtctgttggctgcataaatgtcttcttttgggaagtgtctgttcatatcctttgcccactttttgatggggttgtttgatttttttcttgtaaatttgtttaagttctttgtagattttggatattagccctttgtcagatgggtagattgcaaaatttttctcccgttctgtagtttgcctgttcactctgacagtagtttcttttgctgtgcagaagctctttagtttaattagaacccatttgtcaattttggcttttgttgccattgcttttggtgttttagacatgaggtccttggccatgcctatgtcctgaatggtattgcctaggttttcttctagggttgttagggttttaggtctgacatttaagtctttaatccatcttgaattaatttttgtataaggtgtaaggaagggatccagtttcagctttctacatatggccagccagttttcccagcaccatttttaaatagggaatcctttccccatttcttgtttttgtcaggtttgtcaaagatcagatggttgtagatgtgtggtattatttctgagggctctgttctttccattggtctatatctgtgttttggtaccagtaccatgctgttttggttactatagtcttgtagtatagtttgaagtcaggtagcttgatgcctccggctttgttcttttggcttaggattgtcttggcaatgcaggcccttttttggttctatatgaactttaaagtagtttttttccaattctgtgaagaaagtcattggtagcttgatggggatggcattgaatctataaattaccttgggcagtatggccattttcacgatattgattcttcctatccatgagcacggaatgttcttccatttgtttatgtcctcttttatttcattgagcagtggttcgtagttctccttgaagaggtccttcacatcccttgtaagttggattcctaggtattttattctctttgaagcaattgtgaatgggagctcactcatgatttggctctctgtttgtctactattggtgtataagaatgcttgtgatttttgcacattgattttgtatcccaagactgctgaagttgcttatcagcttaaggagattttgggctgagacgatggggttttctaaatatacaatcacatcacctccaaacagggacaatttgacttcctcttttcctaattgaataccctttatttctttgtcctgcctgattgccccggccagaacctccaacactatgttgaataggagtggtgagagagggcatccctgtcttgtgccagttttcaaagggaatgcttccagtttttgcccattcggtatgatattggctgtgggtttgtcataaatagctcttattattttgagatacatcccatcaatgcctaatttattgagtgtttttagcatgaagggctgttgaattttgtcaaaggccttttctgcatctattgagataatcatgtggttttcgtctttggttctgtttatatgctggattacgtttattgatttgcgtatgttgaaccagccttgcatcccagggatgaagcccacttgatcatggtggataagctttttgatgtgctgctggattcggtttgccagtattttagtgaggatttttgcgtcgatgttcgtcagggatattggtctaaaattctctttttttgttgtgtctctgtcaggctttggtatcaggatgatgctggcctcataaaatgagttagggaggattccctctttttctattgattggaatagtttcagaaggaatggtaccagctcctccttgtacctctggtagaattcggctgtgaatccgtctggtcctggactttttttggttggtaggctattaattattgcctcaatttcagagcctgttattggtctattcagggattcaatttcttcctggtttagtcttggaagggtgtatgtgtccaggaatttacccatttcttctagattttctaatttatttgcatagaggtgtttatagtattctctgatggtagtttgtatgtctgtgggattggtggtgataacccctttatcattttttattgcatctatttggttcttccctcttttcttctttattagtcttgttagcagtctatcaattttgttgatcttttcaaaaaaccagctcctggattcatagacatttcgaagggttttttgtgtctctatctccttcagttctgctctgatcttagttatttctggccttctgcgagcttttgaatgtgtttgctcttgcttctctagttcttttaattgtgacattagggtgacaattttagatctttcctgctttctcttgtgggcatttagtgctataaatttccccctacacactgctttaaatgtgtcccagagattctggtatgttgtgtctttgctctcattggtttgacttttaacaattttcacttgagcacccacttgaatctgcttttgtctggccataaaaatcccacatgggcaccctcagttcactaaatactgctgtaaactcatatgacagggtctccagtaagtgagcaagtttcttttctcggcatcttggctgagccacagcacgaaaaggcacacctatcttgtgatgtgcctcaagagcctatgaaggaagttctgctgcagctggtcactgcctttttctctgaactttctgataatgtctaccttttcaatgtcaaggtcacttgcattagcctatattaaaaagttgcattttatcataaatataaaaagatcagtccaaaccaattccagacagaatataggcacaaaggaattcatattatccgggaaaaatcgctcatatttttcttttcttctttttttttttttttttttttttttttttgaggctgagtctcgctgtgttgcctaggctggagtgcaatgacgctatctcagctcactgcaacctctgcctcccaggtccaagcgattctcctgcctcagcctcctgagtagctgggattataggcatgcaccaccacgcccggctaatttttgtatttttagtagagacggggttccaccttgttggccaggctggtctcgaattcctaacctcgtgatccgcccacctcagcctcccaaaatgctgggattacaggtctgagccactgtgcctggccattttttttttcgtttcttttcttttctttctttctttttttttttttttttgagacggagtctcactctgctgcccaggttggagtgcagtggggcaatcttggctcactgcaagctctgcttccccggttcatgccattctcctgcctcagcctctcgagtagctgggagtacaggtgcctgccaccacgcccggctaattttttttttttttttttggtatttttctagagactgggtttcaccgtgttagccaggatggtcgtgatctcctgacctcatgatccacccacctcggcctcacaaagtgctgggattacaggcgtgagccaccgcgcccggccacgcccggccatttttcatatttcacaagctgaaaaaaagttataattgtcctttaaaaatacatgtctaggccgggcacggtggctcacgcctgtaatcccagcactttgggaggccgaggcgggcggatcacgaggtccggagatcgagaccatcctagctaacactgtgaaactccgtctctactaaaaatacaaaaaattagccgatggagtggcgggcgcctgtagtctcagctactagagaggctgaggcaggagaatgacatgaacccgggaggcggagcttgcagtgagccgagatagcgccactgcagtccggcctgggcgaaaaagcgagactctgtctcaaaaaaaaaaaaaaaaaaaaagaaagaaaaattcatgtctgtggcatatgcctgtaatcccacctactcgagaggctgaggcaggagaatcgcttgaaccagggagttggaggttgcggtgagccaagatcacaccagtgcactccaggctggcaacagagcgagactctatctcaataaaaaaaaggccgggcgcggtggctcacgcctgtaatcccagcactttggaaggccgaggtgggcggatcatgaggtcagaagatcgagaccatcctggctaacacgatgaaaccccgtctctactaaaaatacaaaaaattagccgggcgtggtggcgggcacctgtagtcccagctactcgggaggctgaggcaggagaatggcgtgaacccgggaagcggagcttgcagtgagccgagattgcgccactgcactccagcctgggcgacagagcgagactctgtctcaaaaaaaaaaaaaaaaaaaaaaaaaaccaccaccaccaacaaaaaacttgtgtaatcaatctaggtgcaagaaaaaaaaacaataaaatatgaagctgaggtctttcaagccagtaatatgatattgcctttttaatttcaaaaaacatgttatggctaatgaatacatgaacatgtaattcattcagattaaaatatttacagtacaatatttgtgtttagaactcatagtaacacattttatgcagcaatctctgtcaaattcattagtttgatttatacccagtgtataatacacaaacactgcacactaacaatcatgtcaactaaattattttattgaataattaaatgaacatgcctgataaaaacataactctgtcaaattcaaatgaagtcttatctaagtattttcacattttaggagtatagcgtatctctatgtatgtcactgaaagccagaattataattaaggtttattttttgcaggtagctaacaagaaatttcttttccacaaatgagtttgccaaggctaatttggtcaaaaggtttctgtccttggctcccctgttgccactactgctgggtaatggttacactaatcctctttgcatgagaggtcctgatgtgtttgctaaacccagatcgctgaagcactggtctggtgactatattttttgagaaccactgctctaaagcacctaaattatgttttctgaaactttcccttcaggcaaaatggactagtaaaatttttgctgggtaactgagacacaaaataatggccttaaaaccttttatcctaatgctttgactttctctctaatgtggcttctaccacttgtacctagaacaattaaccacatcctcaacatcaaattatatttataaggcatattcaatgtgttgacagatttaagcttatagaatgaccaaaatagaatacagataggaagcaccataaatgtaacaaaaccacttcaaaaatgtaccctgccatagccctagtagtttaactaaaatcttaagcgacaatgaatttaagctcaatttggggggttaaaaaacaacagataaaattcaggaatgatttttttagacgtatggagtattaggctgctcatctgaaattattctcatcattctgaaacctgttgctgtacagccctgagagctaatttgtaaagggttattaaaaaaacagacatgaaaacaaaagataatacctaaaatacttgctggctgcccttcgtggaaggtgtttgccaccccatgcactgcagaatcctctagctgtggttactgagcctggctctgattgttttgaggtggccatggtgagaaccgctcacaggcagatagtttgccatctttgatctgaaagttgaattccctcttttgttgagaacctcacataataaattattcttttggacctccatattgtgtaattcagtacactccactgatggctttcattggaatatatattatataaagaatagatcaatatttctgttcctggccacatattcctgtgtatactataaaagattggttttgacatagacagtcttcttgaaattctgctttgtcaaggatattaataatatagtttgttttattaaaatcctattttccccatcttctctctgcttgacccaattccaatcattccacaagcacagcttcattccattaacattgatgcagccccttctgggtatcactcactgtgctggaggctgggagaaaacagtgaacaggacaggcctggccctgccctcactgagcggacagtgcttccacactttcttacttctatgaggaaggaatgtatttcacaggagacatcctaaaatcctagaaactacagtgacaatttacagctcagaatggaagaagtaggcagaaaaaggcttgcctttcttgaaagtgtccagaaggcaagaatgaaaagaaacaagggaatcttaacacaccaatctactttcacataacatttacaaatatgcatcagaaagtgcccaatcatggttcaagaaatcctcaagttagccgacacaactgaacagcaactcaacagggagaatccaaattgagactagaggtcaggaaatgcatctccaaggagtcatatttaagcagagacttgaatggtgggatgtaaacatacaggtggaaaaaatgggaagaagcattttcagcaggtaaacccacgtgcaaagggtgagaagagagtgtggctcagtggactgaaagaaggcctggtggggaggaggcaggaggtgaaacgaaggctgtcaggaggtgagatggtgaaccttgctgagaagtgtgtgctatcttagaagcaatggaaagctgctgaatgttgtaaacaagcaaccaattatatctaatttgcatttttcaaaggtaacttagcagcaatgtggagaacataatgtactactgagttcagagacagggagacctacagtaagaaagcaattgcagaaagcgaggtgagtgcagctttgcattaagtgggtgagtagagctagagagaaggaaatgcagttgagtataatttggagataaagtattcagaatttgctatttactggatgtgtcaaggatgactcccaagtctctagtgtaagttcctggtgaatgacagaaccactaacagagacaaggaatagggaaggaagagtaggcttaggggtgtgtgagccaggtgaagaaagcaagttgggacttgttacattttaagtgcttgtgagacaacaatgttacttgttagagatgcctttgtgttcttagtcactggtcctattgtccaactctgaggtctttcagtcatcataggtcatttcaggcttcaaagtctggtaacaatcaatgatagactggataaagaaaatgtggcacatacacaccatggaatactatgcagccataaaaaaggatgagttcatgtcctttgcagggacatggatgaagctggaaaccatcattctcagcaaactaacacaggaacagaaaaccaaacactgcatgttctcactcataggtgggagttgaacaatgagaacacatggacacagggaggggaacatcacacactggggcctgacagtggggggctaggagagggatagcattaggagaaatacctaatgtagatgaggggttgatgggtgcaggaaaccaccatggcatgtatatacctatgtaacaaacctgcacattctgcacatgtatcctagaacttaaagtgtaattgaaaaaaaaaaagcacaaagtctggtaacaatgtctggtatttaaaaatagcattttaaaccgggcgcggtggctcacgcctgtaatctcagcactttgggaagccaaggcgggtggatcacgagtcaggagatcaagacccctggctaacatggtgaaacctcgtctctactaaaaatacaaaaaattagcccggcgaggtggcaggtgccggtagtcccagctactcgggaggctgaggcaggagaacggcatgaacccggggggcggagcctgcagtgagccgagattgcgccacagcactccagcctgggtgacagagcgagactctgtctcaaaaaaaaaaaaaaaaaaatagcattttaaggctgggcgcggtggctcacgcctgtaatcccagcactttgggaggccgaggcaggcagatcacgtggtcaggagatcgagaccatcctggctaacactgtgaaaccccgtctgtactaaaaatacaaaaattagccgggcgtggtggcgggcgcctgtagtcccagctacttgggaggccgaggcaggagaatggcatgaactcgggatgcagagcttgcagtgagccgagattgcaccactgcactccagcctgggagacagagcgagactccgtctcaaaaaaaaaaaaaaatagcattttaaatgcatgaaagttacatatctttaacctaatttagttattgctatgtaatccaactatgctggttctgctgtaccttattaaatgtgtattcatgtgtctcaacattttctttcaacaaattcttagttacactcttttagatgaatagtttgctagcaagtttaatttgggaagtgattaaaaataaatcagtgactaattgcataataactttaacaggaattagaaaaaataaaatagtattaaaataggatctcatatcgaaaagtatgagaggatgctgtgtttcatatgattctaggattactaataatactttcctacttaacatcaaataaaaagcttaaggctattaaagtttagagaaatgtatcccatttattcttagatcaaaatatatcctctattcatatgtttgaataaactgagaatgagaatctcattctccaatttggctacaaataaatccacatcttccctcacctgcaccagctcttcagcacctggacacaggaccgtgcttcgcacatcttgctcagcacggtgccctgcacaggggaaaagttccatgagcagatattgaaccgaattgagctagtgttcttttctcttttcttttctttgctttgcttcccttcgcttcttttccttccttccttccttccttccttccttccttccctccctccctccttccttccttctctctctctgtctttctttcctattatatctccctttcttttatttccttttttttttttttggcggagtctcgctctgtcgcccaggctggagtgcagtggcacacaatctcggcttactgtaacctccacctcctaagttcaagcaattctcctacctcagcttcctgaggagctgggattacaagtgcgcaccaccacgcccagctttttatttttagtagagatgaagtttcaccatgttggccaggctggtcttgaactcctaacctcaagtaatacactcgccttggcctcccaaaatgctgggattacaggcattagccaccacgcccgacctgagctactgctttttctaattagcttgactattttctgtgttttccacactgggagtagataacaaggagcagcattctctcatatgactaaacatcagtatttccaggttttccttcatcagggaaggtgactacttccactttcctcccatgttgttatcttcccgttaatgcattttctaaactcaaatctactcagagcaggcccagtactgaatagaaggaggttctatatgtagcctcttttttctccatatgctccctaaacatttcaaaatacatattctttatttttacagaataacaggtttataaatattaacatgtattgatgctgttaaataaaacctatttttttccactgaagcagccaatttttttttttttttgagatggagtctcactgtgtcacccaggctggagtgcagtggcacgatcttggctcactgcaagctccgcctcctgggttcacaccattctcctgcctcagcctcccaagtagctaggactacaggcacccgccaccatgcctggctaattttttgtatttttagtagagacggggtttcaccgcgttagccaggatggtcttgatctcctgacctcgtgatccgccctcctcggcctcccaaagtgctgggattacaggcgtgagctaccgtgcccggctttttttttttttttttgagatggagtctcactctgttgcccaggctggagtgcagtggtgtgatctcggctcactgcaagctccgtctcccaggttcacaccattctcctgcctcagcctcccaagtagctggaactacaagcgtacgccacaatgccaggataaattttttttatttttagtagagacagggtttcactgtgttagccaggatggtctcgatctcctgaccttgtgatccacctgcctcagcctcccaaagtgctgggattacaggcgtgagccaccgcgcccagcccaatctttttttttttctttctttcttttttctgagatgccacactcagagccatctgagtgtcagaaaacaggaccacccctcacaggaaatcctcttgttgatttgaagggcattagctttattaacacctactctgaagcaggtactttgctaaaccctggaaatttaaagatgaataagactcaattcaagtccacccaggaagttaacttctaaagtaactaaagacaggattatcaaggtcttccataaaaaactaagttctacatgaacagctatttaaagggctgaaaaaagtcatgttcaatgtcagtttggttttgcaacatgtcatgccaacattgatttcagctggggataagcaatactatatgcatatctgtacacttccatcctcatcccaatcctgctgttgaggttccaggccaaagggaggaagctctggaacctggcttcaaagggaggctggagtctgtagtgcaccatgctgcctgcatttcttttgaaaaccctgggagataaaagagaaaggaatcaatgagtctgcagaatatctggtgccaactgcaggcatgagaacaagcacagtgcagagcctgggctgcacctgggtccacacagaaacaccatcagaacagggaggacaaagtggaggagtttactgtgaggtcaggcactgctccacagagggcaagactgcagatgtgccacattagcgatcagagatttaaacagttgccccgaggggatggggcatttcgggcagaacaaacctccatgcagggcacagaggcacggaaggacactgtgagcttacagggcagtgcaacaggatggaacttgtattttaggaaactacagagagctgcagagagctgagtcttgggaggtgggctgggccacattgtaaggggccttgaatatcaaaatatggagcagagactggctccaggcaacgtggggttaagggagttttttaaggagggagagacaatagcaacttgttctgtgtgaagaggacctggtgggggcctggggcctggggcctgggacaggaggagaggcttgcaggagtcagggcagggagacttgctttggaaatctgtagatgtatgccactcctagagtgggaatctttttttttcgagacagagtctcgctctgtggccaggctggagtgcaatggtgtgatctcggctcactgcaacctccgcctcccgggttcaaatgattctcctgcctcagcctcccgaatagctgggactacaggtgcatactaccatgcctggctaatttttgtacttttagtagagacggggtttcaccatcttggccaggatggtctcaatctcttgacctcgtgatccacccacctcagcctctcaaagtgctgggattacaggcagaagccactgcgctcggccaagagtgggaatctttacagctccattttacatacagatctaattggaaggtaattcacaatcaagaatacgttaatatagagaccatgtcatttggaatttaaccaattatttggaggtggtacagtagcacatttatctcttggtgtacattcaggttttgtcctttttttgtttctccttttctaaacagctatgattaaatcaaagtggtggtgattttgcagtgacaatgactctgctgcagaggcttcctgcgtctcagaacctgtgtccttccctagcctgaggccagagtatgagcgtgtcctccttcctcagagggagccctgcctccctgctcaagagtctctcctaggaaggggtgggcttgggaggctgccctggggtggccccaaggctcctaatgactggtgcctggcatttgccagcagcctcggccaggtgctcgtcaggaatgcggggctgtgaggacacaacccagtagaaactggtcatttggtgagtcatatagcgggcatcgctcagccctggattagggtcacaaaaagatgaccctcaggaaaagtctcacggaaagtggtcaatgtgggcctctgaaaatgggcccagagggaagagaggctggggagggaggagcttaggggatctgcagagctaacgacagagggacccaggatgagccaaggcctagtgggtcaacagaaggtgctggatgaagccgtgacaagaacatgtgttcaaggccgctcctcatggccatctagtttctgtcaggatcacaggctggggcacatgcttctcctacggactgagggctgctttagaaaccgatgtgttttcttatcagaacacttctcgtcacctctggagaacatcctggcctggtcatcagagcctccaagcgtcatgtgtcccttaaaataagtatacttaccaattactcaaagaagctcacagtaatctccaggttatcttgaacaaccaacctgctaaagatgccacaggtgcctcaacactgaaggaatcaggtctatgccagctcagctacttcctaaagttaaaccttggaatacacacacattgagtttctctacagctttaggatgcacagtggttgttattgttgctagacaagtccttgaagattatcctctgactcaaagctttaaagaaaaatcttactggaaaggaattctttggtgagatgtagatcagcatggcacgctgtaggcaacatttaggaaagaaggctgatttcttctctctcattccaaatgcctttgtgatacctgcttgggcattgcccagggattccagcagtcagaggttctgtaggatggtttttcttttttttttaaatcctgcctcaggtttatttgtacaaatagcacaggaggacaccacccccacgcatatagcagcccaggggtcacaccagtccttctgttctcagattgacagagacctctactctgaaggcttcgtgggggcctggacacctttggaagcctgagctagaactgaagctggagctgcagactgggccttggtttgatccttggcctttggccggcagaacctgaaggatgacatttctagcagagctccagggaagtcttgctggacagggcatctcctctgccccacccttgctcctcgagtccaggctctttgcatggaggcccagtgaacatggctggagctctgaacttatgtgctggtggacaaaggtcagtgacaatcacaggacacccctcttaacctatgcatgtaacttaccagtggctctttggaaatatggcctcacctctgctctctagttcacagtgacttgaatgcttgggtgtcaggtttggacagggtcccctgaatgcctgggtgtcaggttaggacagggtcccatttcaggagctagcaaatggaagaaagcaggagggcaaggcagcaggcaggtgataatgtagactgtggccagatggagtaggttccaaccttggaccaccattcatctgctgtgtgaacagagggtggacacctttaagtggtaggggactctggctgggcacggtggctcacgcctataatcccagcacttcaggaggccaaggcgggtggattgcctgaggtcaggagtttgagaccagcctggccaacatggcaaaaccccatctctactaaaaatgcaaaaattagctgggcatggtgacgggtgcctgtaatcccagctactcaggtggctgactctgcatctgtggctggggtgggtgaggctttgtttggtatttttattgcctatttttctttttttatgctcaaagctactcctgggcaagttccctgactcttgaatctttttcaaaatttagctcttccataatatttaaacttagctaagttggccactatgcaagcctcctggatttccttccttcaagatattatagcatgactcttttgctaaatttgtattctcatgcaatattagcatgaggaaaattttacaacattttaaaaagtgaatatagctactgataatgaatgttaagctacattgacattcattttggaattagtgatcacctactaagttgaaccacatgaaatttctgtggtgtaaatcaagtcggttgagtacaggtgacttcatatggttgaacctacaggtgaccctggatcactcctccactcctcattttgtaatccaagaaaaggaggctcaggatgtgaagtaacttactcatggtcacataaattattaggcgttgacttagaaacatataatgtattttcttaactaagggaatgaaaaattcttattactactccatttacgaattgccttggctattcttgcatgtaaatagatatacatatatacacacacacacacacacacacacacacacacatatatatatacatgtgtgtgtgtatatatatatatatatatatatatatatatatatatatatatatgtttttttttttgagacagaattacgctattattgcccaggctggagtgcaatggcttgatctcagctcaccgcaacctctgcctcccaggtttaagcaattctcctgcctcagcctcccaagtagctggggttacaggcgtgtgccaccacacccagataatttttgcatttttagtagagacgtggtttcactatgttggtcaggctggtctcaaactcccgacctcaggtgatccacccgcctcagcctcccaaagtgctgggattacaggcatgagccaccacatctgaccaagtatagagtgtttctatgtgattaaagttaagtggttgtccactgaaaactgatgactatgaagtataagaacttttatgcaagcctcatggtaaccataaagaaaaactttcggctgggcacagtggctcatgcctgtaatcccagcacgttgggaggctgaggcaggtggaccacgaggtcaggagttcaagaccagcctggccaagatggtgaaaccttgtctctactaaaaatacaaaaattaactgggcgtggtggtgggcacctgtaatcccagctactcaggaggctgaggcagagaattgcttgaacccaggaggcagatgttgcagtgagccgagattgtaccactgcactccagcctgggtgacagagcaagactctgtctcaaagaaaaaagaaaaaaaaaagagaaaaaaagaaaaactttcactagatacataaaagaaagagaaattaatctatataatcactaaaaacaaaaaatcaaatcacaaaggaagatagaaagcagaaagtgaggaacaaaaaaaacaattgctgaacagaacatcattaaccaagtggcaatagtaagtcttaagtataatcactttacatgcaaatagatcaaatgcatcaatccaaagatacagattgtccaaaaggatagaaaaccaagatccaacgatatgttgtcaacaacactcaccttagacttagtagaaggaaataaataaaaagattagaggaaaaataaataaagcagaaatgaagttgtatactttaaatacacataaggtttgtcaactatatctcaataaagctgtaaaaagaaaatgaaaaaatggtgcaaaattttatccgtgcaagaagaataagtcctagagatctattatacaacataggtcctacagtaaattttacagtactttatacttaaaaaacttggggctgggtgcggtggctcatgcctgtaatcccagcactttgggaggctgaggcaggcagaacatgaggtcaagagattgaggccatcctagccgacatggtgaaactccgtctctactaaagatacaaaaaattagctgggtgtggtggcacatgcctgtagtcccagctactcaggaggcagaggcaggaaaatcatttgaacccaggaggcggaggttgcagtgagccaagtgcgcaccactgcactctagcctggcaacagagcaagactctgtctaaaaaaaaaaacaacacaaaacaaaacaagacaaaacaaaacttgcctagaggtgtattttgtgttgtgtttttatcacataaaatataaataagagcactggggaaaattttggagttattggatatgtttacagaatagactgtaactatccaaaactatccaacttacatattaaatatttactgctttttgtaagtcaatcattcttccataaactcattttgtaaaaggcagataaataatagaaggaaaaatagaaacaaagaacaggtgcaatgaatagaaaacagttaacaaatatggttgatattaatctagttatgccaataactaatcaatggtctaaattcatctattaaaagacagatgtagagtgaatcaaaaaacaaaatgcaactgtatgtcatcttcaagaaacactctttaaatataaatacacatatagtttaaaagtaaaggtatacggaaacgtatactatactaagactaattttaaagaagcttgttttgagacagagggggctttagaacaaggaaattcatcagggataaacaggaacatttgttaattttaaaagggtcaatttttcaatcagtgatatcaatgtacatatatatgcctcaatgtatatgcccaatgacagagcatcaaaacacaaggcaaaaactgatagaactgcaaagagaactagatacatccagtattttagttgaagattttaataccctctatcagtaatagacagacatggcagacagaaaaatcaggactgtcctagttgaactcccccagcatgattaatcaactgaatataatagatgtctatagaatacttccacccagcaacagaataagggaaggtttaccaggatacaccacattctatgccataaaatatacattgaacaatgcaaaaaaattagaaatcacattacatatgttctatgttttcatacccaatggaatcaaactagaaatcagttaacagaaagatctggaaaatcccaagatacatggagatttgaaacatatgcttgtaagtaaagtatgggtcaaagaagacaacacaagataaattaaaattagaaagagtgtgaaggtctctcataggggggcatattgtgatggtaagacagaaatcagtggcatccttgaaacggttgctgggaactgaactgcaccatcagcagagagggcatagtaggtccattggcggctgacctattagaggagatactgcgagtgaggtgcagctgcagacttgaggcagactcaccaatggtgagggaagagcagcgaatgagtcataaccagggtctgaccgtaaggtggcaggatgtcagcaaaggcatgactggtgagctaaaaggccggctactgggtggtgtctgaaatgaccctgtgatgaaaactgtccatgacctgagtgccgagtaattggtgaataggcctgcagaagacacaattatgtgagggactttgggaaacctgggacagcaaaagccacggcacactgaggcttggaaaaatggttccaaggggatgtaaaaggagttgaaaggtctgggtggtagtaggcttggagttgctgcattgtgagcaatggcaggctagaatgggacaggaccaagaggactcagaactaagcagtaaggtctaaacacactgtgtgtgttggaggtgatgtcataggcacaaaaacttgatcttggaggtggctcaatcaaccattttgggtcctatccatctctaatggctgcaaagcacaactgagatgccaagtgtctctaggaggcacaggctgtagaaacagtgataagggtggcctaagggttaaactcaatgtggcctgaggagggtgaagagcctgaggccgactggttgtagattttgtctgcctgccttactctaaatatagcctcacaatctggactcgatggggaaagggtgggagcagggtgagggataaaagactaccacacattgaatacagtatagactcttcgggtgatgggtgcaccaaaatctcagaaatcaccactaaagaacttattcatgtaaccaaacaccacctgttccccaaaaacctactaaaatttaaaaaaagtaacaatagcttaacagtgttgaaaagaatataagaatacaatagttctttcctgatacaattacattttcaattttattaatttaagggagtatatttgggaattcagaaaggtcaagggatgagtactctttagattttttaaaggaaacatcaattagaatcattttgttttgccataaataatgtcatatgctgtttagtacactggaaatttttcttctattatgtgacaaaaatcaaagatgtattccaaaaactaattttctcaacatcaaaatttatgagtaaattataattttaaaattttcccttagaaattcatgcattcacaatgttgatctccagaacaaggattgaatacattagtcagacatcagtttcttgatgttttgaataatatagtctggcaatttcttctgtttcttagccttctgtatataatacatggatattgtccatattattgaaatgcaaatttattgaaaggatactagcatgtccactgagatttatagtgtatcagttttggaaaaatcccatctcattatatgaaactgtactgaaataagagcaaaacatttgcaaaccatatagctttaagtaattagtgacttgttcaggcctgccccttaaatttttctgtttttggaagaaatcaatgagtacagactgttgaacttggatactccacatttaaagaatgccattttaaattccattcttcctgtaaaactaacattttacatccaaaaaaataagtaaatatagccccacaatttgatggaaatggcaggctgttgtatcatgtgggacaatggctcattcccattgagttgtgtggttagttgtcaatatgagggcccattgaacctctccctctttgttatcaggcagaaggacattatccacatagtgccacaagtggacatcaggtggcagtcagagggtagctagatctagtcaatgcaaccttgagccagcagaggattgttgaggtagtccatcagatgcctcctaacggtgtactgtcagccttcaaatctgaaggtgaactgcacctgatcttcttcacaaatagacacaatataacatgtttgccaggtcagtaacaaaaccaagagggagaagcattctgaacttcttcaaagacaatgacaatgctgggtaaggggactctaaaaggaagtacagccttgttgaggttgcggtttttagcaatgagccttcattcctttccctggccttgagaaagggccattggtgagttaaaaggtgagatggtgggtttcagaacacaagctctattaactgggcagatcccctctgtgccttgcttgggtgatattatgaagtactgaccacctggaggagtctggggagctgtaaaagttcccagtaggcatgacctacttccgtgcaaagaacttggtggggtgagaccctcagttggggaactgaagtgccagaatgtccaggccaatgataggaaatggtcactgagaaatgggcaggagaaacactggtgctcaagggagaaggatgagtcctaccttaacactgagcatggcaggcatcctaagggctcatcttcctctcagtccatcaacgggcacaggaaggctggtgcactgcatgggcaaagcagagataagaatgacccattatccagtgtgtaataagactatacacgtctacaggtttgaccaccagacttggatgtgataatctgattgacacaggaaaaaaaagcatttggctaaatccatcatatgattaaaaccctaaccaaactagaaattgaagagtacttccacaatctggtcaagtgcatctaagaaaacctacgataaacatcctcaactaagttagtgggtaaagaatgtttactccataagattggaaacaatacataaataatcactttgaccactttcatcaacattctactgaaggattttgctcaagaaataatgctaggaaaaaaatcagccaatggctcttcaaaacacttaacgtggaaaggacaccctattcactaagtggttctgggaatagtggctgaccatatgctaagaatgaaactggacccctctcactcacctgtacaaaaattaactcaagatggattaaaggcctaaatgtaagacctaaaactataaagatcctgggagaaaacctgggaaaactcttccagacatgggaatgctcatacattgttggtgggtatgtcaattagttcaacttctatggaaaaagtagggaggtatctcaaagaactaaaagtacaactacctttcgacccagcaatcccactactgggtatctacccaaagggaaagaaatcattatataaaaaggcactgcactcccatgtttatcgcagcataacttacaacagcaaggtcatggaaccaaggtaagtatccaccaacggttcattaaataaagaaaatgtggtgcatatacaccacaaagtactaggcagtcataaaaaagaacaaaatcatgtcctttgcagcaacacagatgcagctgaaggtcattatcctacgtgaatgcagaaacagccaaatactgcatgttctcatgaagatggagagaatacactatggggactcaaaaagttggggggaagagttgaaaacgtacctactgggtacaacctccaatatttgggtgatgggtatgctagaagcacacccccccccattgtgcatgtgatatacatataacaaacaagcacgtgtaccttctgaatctaaaataaaatagaaaaagaaaaaagccaaagaaaaacatcccgggaatccagggagcagcggctactgcctccactgctcactgcagcccgcagattccacgccggcagctcctgcctgcgggcagtggagctgcggagaatggcgggatgggtctaggtgccagggccagagcccaggaggggcgctgggtgggcgtctggccggcttctgccttgcaccggagcaggggtgcctggtgaaacagtcaacctgatgctctctgggccctgcccacgttccccttccatccaccctcctttgcatctttctgtgcctgggggccccataggaagcggtcacatccagactcaccaggcctgagatgctggaggatggagaagcacttgccaccggaaaaatcctccaggaacacatgaacaaaacctcgcctgcacctgggacatccttccttacggctggcctacgaggcaagtgttctgcacacgctccttggctaactccaatgcagaggagcacgtgagcccaaccgccatggcaggtgcagatctttgcctccctttcacaatgactgtattcaaatgacatatcctggaagcctctttctgataggatgagagcagactctgtactacaacacagattggataagtctccaactccgattagtgaagattatccagtcagagatggagactattatccaataagagttgtcaaaaaaagttccttctcacccaatcagaaccaagcttacaagtacagcagttgcgtacagccactgtaaaagggaggcgaaggcccattctgccattttcttttcgtggaggttgggctcgcgtgcttctctgcgctgtggtcgtcatggaccggaagcgtgtgcggcgcgcctgccttgaggccaacatcagggaagggtgtcccaggtgcagaggaagcgtccttcacgtgttcctggaggactttcggctcgcaagcacttctccattctcccaatgtctcgggcctggtgagtctggatgtgagcgcatcccacggggcccaaggcacagagagagagagaggaacggggtggagggagggaagcgtgtgcaggggccaggagcgccaggctgctctggcttcccggcccccgcagcccgccaggagctgtggccccgcttgggacaaggcagaggcctgccctcctgctgctggcgctgtcacctccctgtggtcctgccttctgggtccctgagggccttctgtcatctggaactggaaataagttagtgaagcgaagttttgtgaatatttattggcctttgcgtctttgtcttcattttcagtgctggcttttctgttgggtcatttgtgttcttacgttgatttgaagaatttaaaaaggtattctataaattaatcctttacggggtcatttctagtgcagatagttgtttcttagtctggtcattgtaccttaattttatttaacatttctttcttgctgtacagtatatttacatatactgtaaatcatatgcttttctatttttctgcaaataggatattttacatgagctatttttggatgttaaccaatcctgacttttttagtatatcccacttggtatccatgtgttacattttcatatgtggtttaattcatatgtttttttttttagaatatttgtatttctgttaatgaaagagagggcgtataattttttttctaatgtcctgttcagattgtggtgccaacgtaatgctggcttcacaaaacaaactgaaaaatatttcctgtatttcttctctttagaagagtctgagaaatttaggtgttttcttccttaaatatttggaatatgtctttagactaggtatggaattttccatgtggaacagtatttttgttggctggtttgacttctaataattcaaatcctttggtatatgtaggagttttcttgttttatgttatttctgtgcccattttactaagtttatttttatttttatttttatttttggggggacagaatctcgctctcccaggctagagtgcagtggcacgatctcggctcactgcaacttccgcctcccggatttctccagcctcagcctaatttttgtgtttctagtacacatggggtttcactatgttggccaggctgatctcgaactcctgacctcgtgatccacctgcctcagcctcccaaagtgctgggattacaggtgtgagccaccgtgcccgcctgtattttttagtagagatggggtttcggcatgttggccaggctggtctcaaactcctggcctcaggtgatccacccacctcaccctcccaaagtgctgggattacagtcgtgagccaccatgttcggcctaggaagtttatttttcaatgtaatgttatttgaatctctgttgtcaaacttctagtcctaagtatttcacagaaccctcctagtgtcttaataatacactactctatagagcaggcttctgttttggttcctgatagtgatcttttgtgtcttttctctttgccttaattagtttcactagtggtttattaagtatattaatatttataaaccaacttttttttttttttgggaaggagtctcactcttgtcacccaggctggagtgcaatggctcgatctcagctcactgcaacctccacctcccaggttcaagtgattctcctgcctcagcttcctgagtaactgggattacaggcacccaccaccatgcctggctaatttttgtatttttagtagagacggggtttcaccatgttggccaggctggtcttgaattcctgacctcaggtgatccccccgcctctgcctcccaaagtgctgggattacaagtgtgagccaccatgcccggctggaagttgccttcttttttttattatttttaatttttttgagacagagtttcgctcttgttatccaggctggagtgcaatggcacgaccttggctcaccgcaacctccgcctcccgggttcaagcgattctcctgcctcagccccccgagtagctgggattacaggcatgtgccaccacgctcggctaattttgtatttttagtagagatggggtttctccatgttggtcaggctggtctcgaactcccgacctcaggtgacctgccttcctcggcctcccaaagtgctgggattacaggtgtgagccatcgcgcctggccagtcctctttttatattttactcaagttttttttgtgtttgcggttcagttttaaagtttattaaatgctttaaaaaacttttcagctaaatgatcttactattttctcctgtatttttctgctaatgggatgacttacacgattcattttgaatgttaaggaccttgcattttggtgtatattccgtttagtattgatctactgtattttcataggtgacttcattcatataatattttgcttagaatatttgtagctctgttttatttatttatttttgagacagagtctcgctctgtcgcccaggctggagtgcagtggtgcgatctgggcccactgcaagctccacctcctgggttcacgccattctcctgcctcagcctcccaagtagctgggactacaggcgcccgccaccatgcctggctaagtttttttttttgtatttttagtagagacaggttttcacgtgttaaccaggatggtctcgatctcctgacctcgtgatccgcccacctcggcctcccaaagtgctggaattacaggcatgagccaccacgcccggccccagctctctttattaaaaaggagatacatactgtttatgaaagaggtgacataattttgtttatttgtgtcccataatgtgtcctggtccaattgtgtcctcaatgtaatgccagctacacaaaaaattttttaaatattatctttattttcattttagtgtttttctttgtatggactattctataattatgagctgggaatttttcattgttcagttgtttttctgatttttggtagactggacattttcctgtgtttcctgaccatttgcatctcctctcctgctctgtgcactatcaccctgctccagctgcttcccggagcctccctccttcctctccacctgcccgcgtcctccttgtccttcagtttcttcctaagggcccatgggctttctttggcttttacgttcctctcactccacctttgacagttgctgggcttcccatcccctgggaggtttcagaggatggggaagacagaggagtgcagttgccatgcagtgcaatatgggccataatgttcatcctccacggcctgtattgaggacttgctgtgtgccaagaatctgctctaagaatgtaactgtgctccctcacttcatgctcataaccacctgtgagatgggcaatgttctcatccacttttacacagagaacacagaggcacagaggagtttcataaattgctaccaaggccttccgctggtgtgcagcagggtcaaacccaggctgtctggccctggggttcagcctctcaagtgctctgctagatgttggacaggacaaacgagacacagagaatgaacaccacctgacttgggctggggaagtcagggatggcttcctggaggaggtgacacctcagtggaaccttgaaggaggagcaggaggagctgaccaggcaatgaataagtatgtccaggaaaaaggaaaggcctgagtgatgctgggaggctggagagctggccttgggtgtgtggcggagggggggcaggagatcaggaccaagggtttgaccaaggccagatcttgaagactcgggccatcccatagttgataccttatcccagggccaggcaggccttccactgctctgtgcgcactggtgggcagtgcctcatgggatgctaggagcctagaccccagccacccacctgggctcctgagacccgaggtgcaggcacggggctgggaggggttgcagctgatttacattcaacagattgaggggaaaactgcaggtgcctcgctgtgcagatggaacccaccgccagatggaccccggagacagcctagattcacagcctttccctgctgctctgtccccacaccccaggcggggagcaaatcttttctctgatcatcttttgtgctcaccacccatatcccagacatgtacccgaccaggggctcaaatacatacagtttctgagcgagctggataaggcagtgaccagaggctgcctcgacacaggatgaaattgcccagtgctctggcaccacgagtcagaacccagccagaactgtgacctggcagtggcagaagctgtctggtgctgccaaatcagccctggccagttgttcattgaccccctctgggaccttggctgagccacttcccctcagctgtaaaatgaagaagactgtctttcctattagatatccctcaaaaacacaaaagtgctttgaacctgccagactccctcttgaagagtcacaagaaaaggctctgagaagtcctgcagttaaaaaaattttttgactttctttaacccagcatttttcaagctaattgaccacagagctctttcttggtgcaacacctgttaaccggccaagtgtgtgaggaggcacaagtagagagctctgagaatcaccctccttggctgctctctggtctcagggtgcaggaaagagtctccgtgctacatcccagtctgcggtagtccagggtgtgagcccagcccacagagctagtgtcagagaggaattccctttcttccctttctgttaatggagcttctccctcaagcttctactccacctggctggtgtcagtcttagggttttcatgctcctctttgggcttgatgggggttctgggattttatgtaggttgagatagcagtagaggaggaagggcatggacagcttctctgatcagttgggcatctgccatcaggtcagtcgggcattatctccccctcaggtccggtggctttggtggcttccaggccatgaatgggccctggagcctccccaaggctgcccttgtcacataggatccactgccggactttactcagccactgcttcacactatggcagggtgggtggtagctccctccttctccactccccagcccaaactgggggagaattaggagtctgtttttaattttgtttgatcctttgattttagatttgcttttgaatagataatatagtcagatgatttgaaactcagaatgtattgaaagattattaataaagtcttttttccctctttgtccaccaactgctcccttctcgcctcccctcgagtaagcagttttcttaagatgtaatttccatgccataaagttcacctgtgtaaagtgtacaagtctgttttttagtgtatttacacagttatgcaacaatcaccctaactaattttagaacatatttttagaactaatttagaactaattttgatcaccccaaaaagaaaccttgtcaatcttcattcctcccctaccctaggctaccactaatttattatctgtctctatagatttgcctgttttggacattttccataaatggaatcatacaatatgtgatgtattgtgactagcttcttccacttggcataatgttttcaagggctgtccatgttgtagcaggtatcagtacttgcttcagttttgtggctaagtaacattccactttatggatatgtcatatggcttttccagtcatcggtggatggacatttgggttgtttctacttttttggtcactgtgattgttaataatgcctccatgaacttttgggttcaagttttgggtgaacatgtttcatttctcttgagtagatggatacctagaagtggaattactgggtcatatgataattctacatttagcattttaaggacctgccaaactgctttccagagcagctgcactattttataatttacttcgtgcacgagggttccgatttctccacatcttcactgacacttgttattgaccatctttctcactctagccttcccagggggtatgaggtggtatctcagtgtggtttgggtttgcatttccctagtgacaaatgatgttgagcatcttttcatgtgcttgttgtccagtcatatgtcttttatggtaaaatgtctcttgaaatttgtcttttcgttattctgttataagcattctttatattaatatattctggatactaatatattctggatactcttacttagcaatgaagactgtttgcggtatgggtccaacctgcgttccagttggaatgtcctagtcacctatgcatccacccaacaaatactgccagagagcctaccatgcgtatatatggcagagtccctggcctcaggaagcccacggtctagtccagacacacaacaccacccacgttctttgaacttccacttctctctagatttcttgagccaactaacaactctcaagtactttgcctattcagtattgttttttacagcccttaatttcattttgcacactacttactgttgagttttaatatttgcaaatatttgcttctattctgtgacttgtctttttactctctcagtagtatcctttggtcctattaaaattaaaacaagttataattttcatgaagttcaatttatctaatttttttctttcattgtctgtgcctttgttgccatatccaaagtatcatttccaaattcagttgatggagatttttctcctgtgttttcttttaaaacatttatagttttagcctgtagcccattttgagttaatttttgtatatggtgtcagataaggattcagcttcattcacgcacatggatagccagtttttccagcgtaatttgttgaagagactgtccttttccccattgagtggaattgttagtgttttttacatagaagattatgttgtctgtgaacagagatattcttatgctctcctttccaatgtttatatctttatttctttttcttgcataagtgctctggctatgttgaagagaagtgacatgtgtgcatcctgatcttgttcctgatcttaggggaaagctttcactctttcaccactgagaatgttgttagctgtgggattctcaaatatggcctttatcatgatagggaagttactttctaccctagtttcttgtgtttttatcatgaaaaagtattggattttttaaattgttttttctgcatcaactgagatgaacatagttttttctgtaatttttttccttttttttttgagatggagtctcactctgtcacccaggctggagtgcagtggtgcaatctcggctcactgcaacctctgcctcctgggtttgagcgattctcctgcctcagcctcccaggtagctgggactacaggcacccgccaccacacccggctaattttttgtatttttagtggagatggggtttcaccatgttagccaggatggtcttgatctcctgacctcatgatccacccgcctcagcctcccaaagtgctgggattacaggcatgagccaccatgcctggccttttaatttttttaatgtggtgcattttactgattgttttttttatgttgaaccatctttgcactccaggaataaattccacttggttatggtgaataatttctttgatatgctgttgggttcactttgctaatattttattgagaatttttgcatctaaatacttaaggcatattggtctgtaattttcttttttgtgatggcttcattgggctttggtatcagtgtaatgctgactttatagaatgagttaggaagtgttccctcctctttgatttttgggaagagtttgagaagaattagagttgattctttaaatgttttggtggggttcactagtaaagcaatctggtcttgtgcttgtcattgtttttttttttttttttttttttgacaaagttttgctcttgttgcccagggtggagtccaatggtacaatctcggctcactgcaacctctgcctcccgggttcaagcgattctcatgcctcaacctcttgagtagctgggattacaggcatgtgccaccacacctggctaatttttgtatttttagtagagacagggtttctccatgttggtcaggctggtcttgaactcccgacctcaagtgatctgcccgcctcggcctcccaaagtgctaggattaaaggtgtgagccaccacacccggccagtaggtttcttattactgattcagtctcctcacttcctcaccagttgtaggtctattcagattttctgtttcttaatgtgtcagttttggtagattgtgtgtttctaggaatatgcccattttatccaggttataaaatttattggtatactgctgttcatagtattctcttataatcttttttattttcataaaataagtaatactgtttccaatttcacttctgattttaataatttgagtcttctctctttttcttagtaaatttcctttctgattttgatagtttgagttttctctttttcttaacaaatttcatttctgattttgataatttgagtctttttattagtctagctaatgtgttgctaattttgttgatcttttaaagagctagcttttggttttgttgattttctctattgtttttccatctgtatgttgtttatctctgctgtaatcattatttccatctgctagctttgggtttggtttgctcttccttttctatttcctcaaggtgtataattaggttatgatctggttatgtttcttctttttcagtgtatgcgtttacataaacttccctcttcacattgttttattgtatcccataacttttggcatgttgccttttcattttcctttgtctcaagatattttcaaatttcccttgtcatttcttctttgaccagttgagaaagagtgtgtttaatttccacatgtgtgaattttccagttctccttctgttattgatttgtagttttataacattgtgatcagaaaagatactttgaattattttaaatttttaagaatgtgttaaggtttgttttgtggcctaacatgtggtctatcctggagaacgtaccatgtgcacttgagaggaatgtgtattctcctgttgtggggtggagtgttgtgtatgtgtctgttgtgtccagttggtttgtagtgttgttcaagtcctgtattttcttattgatctgtctggttgttctattattgaaagtgaagtattgaaatgtcctagtattagtgtaagagtatttctccctttcattctgtcaatttttaaaaatatactttgggatcctgctattaggtttatataaatttataattgttatatcttcttgctgcgttcctttttatttttatttatttattttagatggagtttcactcttgttgcccaggctggagtgcaatggctcactgcagcctccacctccagggtgcaagcgatactcctgcctcagcctcccaagtagctggggttacaggcgcctggtaccacacctggctaattttttgttttttgttttttaagacagagtctcactctgtcaccaggctggagtacagtggcgcaatctcggctcactgcaacttctgactccctggttcaagtgattctcctgcctcagcctcccaagtagctgggattataggcacatgccaccacgcccagctaatttttgtatttttgatagagacagggtttcaccctgttggccaggatggtctcgatctcctgaccaagtgatccacctgcctcggcctcctaaagtgctgggattacaggcgtgagacaccgtgcctggccaattttttgtattttttagtagagacggagttttcaccatgttgaccaggctggtgtcgaactcctgacctcaggtgatccactcacctcggcctcccaaagggctgggtttacagtcctgagccacctgcctggcttccctttgttaatatataccttaacaatgtatattttctcccattctataggttgtctgtttactctgttgatagtttcttctgaagacagtggaatactatgcagcaactaaagtagccacctagcaggatgtgtaccagtatggatacattttgaaaacacagctaaaagcaaggtgcaagggcataataagcatagatggtgagggatagagcatattaccatgttacaaacccgacactctaaaagcacaatatagtatatataacattgtgtaaaacactcaaaacacccagaacaatactaggcattatcatggatacatacatatatagtaaaagtgaaaaaccattcaagggatgaccacatagcaattttaggataatgcttattactctctgaggtgggagggtacattgaagctttaaaaaattcttcctagaataaaaagattttgcaaatgtggcaaaatttaactattgttaagtctgagtacctgtttatcattattcttggtagtttcctgtatatttagaatattaacaatcaaaaattgaacaggtggaaggactgtactgtgccacttttctgcttctggtatgtgtatgtttcagtgctctgtgccttccactgtggttctctatcaggttcatagtgtatttctctaaagaaacattgtaacttactgctaagtatcttatggctaaggagattgaagatcagccttgcttcaggggcgttgttcacagctcagcagcagagggcgccaccccatagctgatgtgcggtggggcggccacaccaggcagccctcttggtacagggccagtgcctcccagggaagcactgctcccccagctgcaggaaagaggaatatttaaatgcgtgcagatttccctttcgcttgtaggaaggggtacagaatccagccatttggaagcatacatcatgtttctctgactgttcgtggcctcggctgtttctgaggctaataatgcaagaaacagcacatgccaaaggcgtctttgccactgtgtccatgagcctgctgctgacttgccaggggttttttgtgatgtattattttagattgagggggttcgtgtacaggtttgttacatgggtatattgtgtcatgatggggctttggcttgtagtggactgatcgctgcgggaactttgttgttaaactgaccagggaactttccttttattttaagtggaaaaagattattcatacctgaaggagatgtgtaatcaccaagcagaacagctaaacagaaccagcctaaagctgcaagaagcatcatcagagagtgatgcagagatcaaagacatgaaagaaaccatgtttgcactggaagatcaggtggaacagcactgggttatcaagttacacagtactcaacttatcagtgagctaaaaaataagtggggtcaagcccaggtgaaatgtggattggaagtgagtaggacactaaagaacccagcagcagtgggtgactgtgggaaggtttttgaccgtgtgttggctggggtttatgaagagtctttcatttgagtgtgctataatctcccgggaagaatgtcacctaagaaacaatcattaatctcttaaactaagttgaaaactggataacagaagaaaagagtaagtaacataagtgactgtgaaaaatagcaaatgctttgttgtttgttgttgttttagagagagggtctcagtctgtttcccagactggagtgcagtggtatgaccatactcaccacagcctcaaacttgtgggctcaagcgattgtcccaaatcagtctcccagagcactgggattacagatgtgaatcactgtacccagccacaaatgtttcttgtctgtgctagatgtgctgtgtgtgagccatgctgctgccactgtctctgagcagcctgatcggcttggaggccacaagttgggacacttcagctgtgactgtgtgagagttcacagggacttttcctaaggacattctgtggggtaggaatgggttattcagaagaaataccttgccaagcattgacactgtgttgtcaccaagcattgacaatgtgttgtctcttggagctgatagagttggatgataggtgtcagagtggatgaaaaatgtgtgctcttggtctaaggaagaaaacaattcctgcatgtgtgccattgatggtaggatatcaagtaacttacagatgttggccacttagttgctgaagaggcatcattatgtggcttatgagctcattgtttactttgacttgggaaaagaaatttttaaaagggattaaacgttgcctgctttgtccaaatgagccttatcaaattatcacatctaatgtgcttcgcttttgtgacaaaagacttaatggacatggccaggtgtggtggctcacgcctgtaatcttagcactttgggaggtcgaggtgggtggatcacctgaggtcaagagtttgagaccaacttggccaacatgatgaaaccttgtctctattaaaaatacaaaaattagccaggtgaggtggcgggtgcctgtaatcccagctacttaggaggctgaggcaggagaatcacatgaacccaggaggtgaaggttgcagtgagctgagatcacaccattgcgctctagcctgggcaacagagtgaaactctgcctcaaaaaaaaaaaaaaaaaaaggtttaatgggcaaagcatttaggtcacaccaatcattactaagaatagcctggtcagttgcctgagaagttccccacaccgtgcagttgatcctccttattcacagattcacagattgcacatttgtgaattcacctgcttgctaaaaatttcttttttttttagatggagttttgctcttgttgcccaggctggagtgcaatggtgcaatcttggctcaccggaggttatcctgcctcagcctcccgagtagctgggattacaggcatgcgccaccatgcccggctaattttgtatttttttagtagagacggagtttctccatgttggtcaggctggtcttgaactcccaacctcaggtgatccacccgccttggcctcccaaagtgctgagattacaggcatgagccactgcgcccagctgctcaaatgtattttaacccccaaatcaacaggcagagtacttccactgagtcatttttgtcatttttggacatgcacagagaagtgaaaacgttgagtcatccagtgcttatgctccccactgaggtcagacagacactttaccttctcatactgtacatatgtcttttccatggtctgtttagtactgtgcttttagcatttttttgcgtggttttggtgacttcgctgtttaaaatggccccaagtgcagtgctgcagtgctgcagtgctgtccactgtccctaagcgcagggaggctgagagagacctgcagagaagacacgtatgttacggaagtttcttgaaggcatgagctcctgtgctgttaagcctgagttactgaatcgacaacacagtacatcagagaaagggagaggaagttcaacaatatgtatgtaaagctgccctgacatgctaaagggacatctgtagagtgtgatgcagctgtggaaaagatggaaaagcagccaaatttatggattcatgagaagacggccaattttaaaaagcagtgggcaacattattgtgagactgaaaaccaaagacacgtacgtgcacatcatctcaggtcaggaaaatattaaatccttcttggttagtgctggtcggctcctaggtttcgaaaggctgtaaggtgtgagaatggttaacgttgcaggcaaggcaggttgtgcagatcaggagactgaggaaaaatttaaaaatacttcctcagtgttaggaagaaggaaatgggaagaatgagtttccactgctgatgagacttgcttgttttatggagatattgccagatgcaactctgtgcacgaacctgagaattgactgtgtattccagatattgattagttggttagagtgagagttgacagcacctgcctcgtttcttcttgaacatgacacgcagtagaactgtggaacctcagcattcagtgtcggtgccatccaggctgttctcaggatacagctgaaaacctggacaccattatcatcagtgtatccttccaaacccagcaccatgattgtgaagaaaagtcaaagaagacaagttctgttctgttttgtttttgtttttgtgatattttgctgttgagaatggggttgtattgtccctaaatccttaaaagtcagcacagacacaccaagaaaaccagtgtataattaatgtccacagcaaaatttaggcccacccctgtggttatatcatcatatatccaggactgacaataacccaagccatcttttgaaaagctgttaaactttttaaaaggattttgaagtattattcagatatctttttgctcagagaccccgagacacagccctagaccgatcactccttcccatgagatcctgatgggagagaaatggactgaaaaatgaaaggaaattagggggtgttttctactcagcagaataatcccagactcagactcccaggcccactagaactagaactgctggggtaggacctgcccacaagcatctttttagccttctctggtgattctgattcacagccttcatagaaaactgctctaggttagagcatgaggacctattgaggaatttcagcttggtgactgacaccatcagatttaaactcgaatgactctgatagccatatggagagaattggaggcgaggagaacgaagggttgcaggtgtccttaagtagggagaggcaggcaagccacctgggaagatgtcaaatgcacacatcctcgggttctgtctgcccttggagattctgcctccaggtgtctggagtgtggactagaacatcagtgcttttgaaaagcttcaccaatgattcagaggcttaactgccgttgagacccacgactctggaaagtgctttacaaaccacaggaggaataagcagtcatgtgctctgttatgtgaaagcctctatctcacagcaataaaggacactcaggatgattgcgtgtgagtgcgagggaggccgggctcggtgtgcaagtgtgtgtggccaaggaggcctcttcccgtagtgctatttggttgtgcatcctgtctgctgagactgtaacctcaatatgcaccatgtgtttttcagatcatcgtgttccctattttggaggaacttgctgcttccagcccctctttgcagggtaaattgaaattgctaaaagttgcatttagagtagaatgcatttagagtagatttgaacacctgctgtggcatgtggagctgcccctttgctacctgacttatcttctctcaagagtctcacaactcttccaaggcctgtctgaattgtctatttctaggtaatgtgatcaagctggagaaacagaagtcagatctggggaggcagctaaagactctgactgagcagatacaggggagatgtggcaggagccttcaccaccatcttcctataaattacccctccaaggtctggatcactctctctatcctgctttatcttggaacattttcatgacatgggtcctgaaactgtaagttcttgccagcaggaagtaaaatcaaagcagtcatttgttgtcaggatggagagctctcataacctgaaggtgtaatttccaccagtgccttttcctagcagcaagacaccgtgaaagcagggcctcactaagcactgctggctgttctttcttggtgactgatacaggggctctggagtctctgcccaggcaccagccctggcaggcatctgacacagggttgggctctggcattttcagaagaagaccatggaatggaggtggttccagccggatctgcagactgcggtggcagtggccaacaatgtcaagtgagaagcccagcaggagctgggcactgtgaagaggaaactgctgaactgctggaggagaaggagaaggaggaggagaatgcctggctgcagaaggagctgggggatgtgcagggctgcggcagggtggtttccagcagagctgcccctccgtgagtctagtgggcacccaggccatgcttgcttttcacttaattactgtgcgtggggctccctggtagggatgagacgcttcatgtctctctgtgcaaggctctgctgtttcttttctgggatcagtctgcattaccagtgctaccgcatcactaggaacattccatccagtgcccagtttctgccatgcttagcagcataaggggctgctaagcttctcacttacatatgaagggccagttctagccaagtatcctgctaggcttaaagaatagaagtcctgtctaggatgctccttgaatcttagtatttattagtgcagggagtgcacactgataaatacgaacccaccaccttgcacaggtcactcccatgcagtgggagaagctggaatcactcctgaggggaggagccaccaaataaggacacattcctcccggcccagggatgtgcctacttatttgacaacacccatgggctacttcaacaggccttgacataactcactttattttaaaaagagtggaaaacatgcatttggctgatgtatgacattcccctctgctctggatgggaagaaacacatagcctatcagcccagagagctctgctaatagtgacatttaagagtatttgggactacagttgcaccagacaagatcattactttatagccggacctctaccctctggccaccaaaggatgtggattttaggaaaactagattttgcagtgttccctgttgaaacagcagtgagggcattcagggtggcctctgtgtctgctgttgtttgtttgcctctgtcttgcttccctattgtctgtcattggaagaagatcccagtcagaacttgtgttgcttcacatggacgctattttaatgataaatggtaaaaggtaagtcctaagtttccatggtagccctgaataaccaggttcttgtatgagctgctgcatttcttatgtatactgtgagacacaggccataccatgcagtgtgaaccctggtattctaggaaatctccgcatgcatcctggcagtttaggactccctatgctgcatcctgcatcttcagtcttaacgtcattgtttttttaaacacagaattttcttttttgattttccggtgatttgcaacattactttctcaatatagcagtttaatcccttaccacaaaacagttcaaattttggaactgacaccaatgagaacgtgtcatggtactgaaatcaggcatcatgatgattttgcctgccattgtgtttggcaggaagtcagacaagtgccagtgatggtttcttgtctgattttgcacttctctggcaagctgtcacctctgaagagttgactattgggtaattactcgctcatggctcggtcactcctggaacctaccccatgagcaagaactaaaaccaactcacaccctccaagctcccgaagccagccagtgtttccatcttggctgaatgagttcttgattgaaactcaatttgactttggcagtcatctaatgagaactcaaaagtcatccttggttcagccacagcaaaataacttgcagaacattctctgatgagatcttcaagtacaactgagagaaggtaagaacacccaaaaagcacctggatcctgacacgggattacctggttcttaaactgtttgcccccatgggcactcgcggggatggttgcagccatgctgataggcatgagatgaagcacccaggcaggaatgcaaatcagcatttattgccggaactcagtggctacacagtgggatattatctaactcatcaatgatcttcagccctgttacactttcaaaaatatttgtatttcagagttagaataagtgatgttaaggtatatggggaaggaaggtggtagcctcgtctttgcagccaaccagcagtatctcattctcagcctcatctttgcagccaactagcaatatctcattcccagccccgtctcctgcctctgttaaaagaggtgggaaaagtgagtagttttcaaggtccgtttaagctctgctattctctggactggttgttcagctgacctttccctggtgggagagtcagaaattcctgtgccagccttagcatctttctgatacaatcctttgaacctctttgacacagtggtttccccattgttgatgagcagtgcatgacacaaggcttctctaacagcagcggggaaagacctctgcatttactgtgtttgtttatttctcttgttctgaaacagtaaatgctgttatttcagggtgacttacctaattcttacagtgtttatataacaccagtaaacatccatggaaaacatctttaaaagagatcattaaacacacttaacatctgtgcctaattaatgctattggtatctaaatagaatgtctgtgattcgaatgtgttttgcctgcaccaccagttcttgggttgtcccctctcggaggtgagcactgtggcagcacagcatgtgcagactccgctggaattggcttaactccgtgtgtgcacatcagtgtcagcccgagcgtcgctgcatgtgcccgcactgccctctgtgttgctctgatggctctaatgggtcacagccgctcagcacatgttctctagctgctgcagagaggggaagggcagaagttggaggtatagattcttgggtccctaaggtcccttttcaagctctctcgctgcagatgctctggtaccgaccccctgtcccaggtggagggagcccattccgctaaggattcctaaacagtttctgaacagacttcaccttagcacccatgacgaacaggggcttctggcatttaatttggcccttaatgtagaacctggtcctctgatatcctcttactgtagccagccttatctgttgactcacatagtacttttttttatagtttacatttatgacatagatacacagtctataattctaaatagctgtgtctgcctccctattccctaatccgcatctttacagatttgaacggtgtggacataagcttctcttaggcctttaggatttttaggttgaaattatgaaagaaaaaaagttttttggccttgacagtagagggaagcacaagcctctctgtaaattctggaggggcctgtggtgttcatcatgggcatctctgcttcaccacacagttctttgttggagaagttctggtggaggagcctagtacaggcatttgtagtctgacattttttttatgtccgaaaacctttggcttccaaaaaattggagcagtaggaattaaaacccattggcctatcctggacattagcttgtccctgtaggacagtgtaagctggaaattcttgcgtttgtgaactaagaccgtgttgccttagggtaactcctttacagcctctccctccccatttctattttcacctctccgtgggctctgtcagctagcagagcatttggtggaagaaagacagcccagctcttcccatgattgggagccacagccatctctgtatgaaagggggaatgtgtagaagagaaattacctctttataaagagcccaggtgtctccttgtgacattcactgtttctcggaatcattgcctttgagtctgctttttgtccacattttggaatcagctcactgcatgatcaaagatgatccttcgcttttttctttttctcagaagcttcagcagtcttttatttggagaataaaatgaagttgtactgaaaaaagaaagtacaggtctcatgaagaagagttatttgcagctggaatgttgagagggcacagtggcagagcagatctgagtaatgcttattccgaagaagtcagaaagtttggcttccttctgtggggtcttgattgtgcctctttacacagggtctgacttcattacctcatctgaaactaagtaccactaagctttggtttgatttccagaatcttgctgggctaaacacaagtagatgtttcgttcattgttgggaataggcccccaaaatctggccataaactggtccccaaactggccataaacaaaatctctgcagcactgtgacatgtttgtgatggccatgacgcccacgctgaaggttgtgggttaaccggaatgaggacaaggaacacctggcccacccagggcagaaaaccgcttaaaggcgttcttaaaccacaaacaatagcatgagcgatctgtttaaggagagcatgctcctgctgctgataactagccagagcccatccctttatttcggcacatccctttgtttcccgtaaggaatagtcttagttaatctataatctatagaaacaatgcttatcactggcttgctgtcagtaaatatgtgggtaaatctctgtttgaggctctcagctctgaaggcttgagacccctgatttcccactccacacctctatgttgctgtgtgtgtctttaattcctctagtgccactgggttagggtctcccgaccaagctggtctcagcagttgatcataaaggatgctgttaagccagataggtaagcatggtgacagtggcaatagaaatctaatggaaaacagttgaatgacaactacaccaaaagccccatgggtgaaactcagcctggaaacttagtgttcaactcagagcgatccacaattttatgtggattttaaacttccagaaatgtgattttaaacttccagaaatacctgtgtttgtgaagatccaaatccatttcagcaacctccatcaggcagaaacctcctgcagttctcagcatggagctattagctatccaaaggaaagctagtatctattttatccaaaggatgagacaaggcaagagttactgtctaataaaaggaaaattaggaacaggagtgctctttaaactcaggaagatgttttggggtgtcaaaccagacagcacagaatcactagaaacattagcttggtgtgagaaggaagagacattgatatcttctgtgtaaaaataaatacttgcgagtaggactgcagattctgggagctctttatctcgtattcagagttgttgggatgatttaaaactcatttgctggatgtttttaaatataaacattaagaaaactgcaacctcaacttaaaaggcaccactgtatttgcagcccacattttgtcctatctttactccaggtactgctgagtatttttatctgtaagcatttgtaaaatgctaaataatgttgttatacagaagctcgtctgctgcttaaggttttttgtttgtttgtttttgtttttgttttttttgagacggagtctccctctatcacccaggctggagtgcagtggcgcagtctcagctcactaacctccatctcccgggttcacgccattctcttgcctcagcctcctgagtagctgggactaccggtgcccaccaccacacccagctaattttttatatttttagtagagacggagtttcactgtgttggtcaggatggtgtggatctcctgaccttgtgatctgtctacctcagcctcccagagtgctgggattacaggcgtgagccactgcgcccggcctgctgcttgagttttaatcaccagctatgtttctgcaggccctttatgtcattttgttctacattttttcatgaatatagtttcagaacttcaaagcctcctcaaataatagaatttgaaggagaaacaagctggactttaaatataagttgtagatagaaggttgagctgggatatgaatgattttattattagaacaagaggacgtggagcaaaaacactagttttgcataaattaattttttttttttttttttttttgagacggagtctcgctctgtcgcccaggctggagtgcagtggcgggatctcggctcactgcaagctccgcctcccgggttcacgccattctcctgcctcagcctcccaagtagctgggactacaggcgcctgccactacgcccggctaattttttgtatttttagtagagacggggtttcaccgttttagccgggatggtctcgatctcctgacctcgtgatccgcccgcctcggcctcccaaagtgctgggattacaggcgtgagccaccgcgcccggccataaattaatttttaagcaaaactgtagaatctcagaaaatatagtatggactttttagtctagatgtgtcttgttgaaatttaaaaatgaatagattggtgaattaatgtattggattttctcctaattatgaagtaatatttaggtatactggtagcaaaatggagatgtgtcaagaaaaatactaatctttctcctccttcagtactcaccctgcaaggtaatcactggtaacagtgtgtatattttttgttaatcataaaatgtataggtttcatttatatatgtttaaatataaacaggactgtgttctacacagtatgctgcaccttcactttttatttcatgtaacatgggcatccttccaggtcaatacatacaaagagaactcattttaagagctgcatggccttccacaggagggacgtgccctggaatattcaaatattgtcttactaatgccagcaaggttatagttttctttgttatgaataatgctataatacgagtccttattcatatagtcctatatagttgtgattttatttttataggatgaatttctaaaactatgactgctgctctagagaatatacacatttttatcttaatagatgtctccaggttactcacttgactgctgtgacatttcactttcttttttttgtttgtttttttttttgagacggagtctcgctctgtcacccaggctggagtgcagtggcacgatcttggctcactgcaagctccacctcccgggtccacaccattctcctgcctcagcctcccgagtagctggaactacaggcgcctgccaccacgcccggctaattttttgtattttttagtagagacggggtttcaccgtgttagccaggatggtctcgatctcctgacctcgtgatcggcctgccttggcctcccaaagtgctgggattacaggcgtgagccaccgcacctggccgacatttcactcttgatgaacgtgcccatctctgcatagtctgagcagccacagaaagtgttgatcttatttttgccaataggataagtgaaaaatactatcttattagattttaatttgtatttctctgagcatatttttatgtgtactaaccaattgcactttctcttctagagttgctagtttagcacttttgcctattttttcactgagctgattgtttctttcatcagtttataagtcagtattttattagggatgtcggggtttttttgtttcgttttgttttgggggggttgttttttgttgttgttgttttgagacagggtcttgctttgtcacccaggctggagtgcagtggcacgatcacagctcactgaagccttgacctcccaggcgcaaatgatcctcctactcagcctcccaaatagcggggactacaggcgaacaccatgccttcctaattcgaatttttgtccagatggggtgtcactttattgccgaggctggtcttcaactcctgggcttgagtgatcctcccaccttagtctcccaaatcactggaattataattgtgaatcactgtgcttgcccaaagatgtgtttttatccccagtgcactacaggcctttggctttaacatctgtatcatagaaaagtttatatttttatataatgttaactgttagtgttttcttttgttatttctttttgtttgtttgaaggttttccctctccaatcttatttgttacaaataaactattaagtttcattctctgttttatgcacgtgcacacacagacacacacacagatacacacacacacaggcgtttgatccacctttctttatttaatctgatgtgagctgtgcgtctttctctcccggttagatagctggtcatgccagcactattaccagaaccatcctttgtccactgaattgaaatcccacctttacatgattcatttcatctgcattcggagagaactgccctaagtatgcccccatttctttttcttttgagttagatctgctttaaaatattaatgagttattagattgcttatattatttttaactcacctttcattttaaattgtcatctttaatttatgtcttcttattttattgaattttaaggtagatactatcagtgtcaaattgtttctggtcatgaatttacaaacgttggtcctctcttgagtgcagtttccccttcactttgtattatgaaatatttgcattggctgggcatcatggctcatgcctgtaatcccagcactctgggaggcctaggtgggtgaatcacctgaggtcaggagttcgagaccagcctggccaaaatggtgaaactccgtctttacttaaaaaaatacaaaaattacctgggcgtagtggcacgttcctgtaatcccagctacttgggaggctgaggctggagaatctcttgaacccaggtggaggttgcagtgagcttagattgtgccactgcactccagcctgggcgacagagttagactgtatcacaaaaaaataaaataaaataataaaaatttaaaaaagaaatatttgcatcaagcagggcattattttgttcatcaccttctcttgctgaagcagatccaggtgtggcagggcgtgacatttggcccaggtcagtgtctggatcctgctcagttccactgcctttacctgacagtgcttaggatcttatgactgaaacgcgttggaaggctcttgaaggtgcatatatattacatattgaaagatacagaagctcaggtagggtagaaaagggtgagtgcctaacggggaaattcacctgtgcccagtttgttctctgcttggtgagcctggaatacagagccaactctctgggtctacatttgcgtgcccctcgtccattttagatgcacgccatggcttttcctgccctgtcccttgtcactactgtcctttgtgtctggggtaaaccaaccttggcctcctcagatgtaaattcctcttgttcccgatcctttgccagaacgccctgcatctctctgggcttctcgtgctcctcaccagccctggccttctagggtgggggacattagtggagggtttccctgatctccattttctttggaagggatttgggggaaagctcttggtattttattttaatttcccccccaccacatactctctattagcagaaattcttcaaagtgtaggcttgtagatgatacctgactacaagatttttactgtttctttgattctttttgttcagatttgtagatgaagatgcttatgttcaaattgccatcttatcctgtttgattttgttgttgaatatgcttatattgaaatttgaaagtgaaattcagaagatactgttttgacatctggagagagagtacttcataatttctgtctcacaatagagggacaaacttctcttagattctttttgtgtaaaacaataagaagtatttagagaaaattacgctccaggcaagggcatagaatgagcaaaggcacagaggcaggacataaaagaaaaaaaacttcaggtggctgggtgtatagtccaaaaactagatgggtagaggggactcatgggagatcaattgaaaggcctggggctgggcttcatccaggtgttcaggaaagatcccagcaggcatgagcatgtggttggcacaacctgccctcttcacaaatattaatctgccagttgtgaaggtagcagtggtgccatgcaacgcttcccaaatggagttacccttgaatacttaaaaaatcatcatgggctgggcatggtggctcacgcctgtaatcccagcattttgggaggccaaggtggatgaatcacttaatgtgatgagttcaagaccagcctggccaacatggcaaaaccctgtttctactgaacattaaaaaaaaaatcttgtataggagctcacctgtgcctggatcagaataaacaacgtaaagtggtgtcttgaggaagtaaaagctatagacaatcactggcaattgaagactctgttctctaatataacaaagaaagcaacaaattagagaggttaaataaaagttttaaagggaaataattacagacatatatgtatgtggtcttaaatgacaaggtaagacgtagaaggcagaccagcgttcagtgaggagggccgtgcaccttgttgtgctctgtggagacgctgcctgcttatagggtgcgtgcgtgtcacctgctgtgtgtgacacaccatcagaaagtctggcctccaaatgttattcacaggtatgggttgccaccttgtaagaacagattattgtacaaaaataggaatgttgaaagaaatattgggaatgttttttcttaaatattattatattttaagaagaaataccatcagcattatttttggaaccgtgtatacctcttacagaacacttgtgcacaacagaaaatttgagaaaggcctggccagagctggatttgcatcccagatttaccattcatgaaccatgtgaccatcatcaaattttcctctaaaataagagataatgtgtggaggttttgtggaaaattaaattagataacatttttaagacacatggtactgtgcctgtcatatacagtggagttatactgtattagtttgttctcactttgctataaagaactactttgaggctgggcacagtggctcatgcctgtaattccagcactttgggaggccaaggcaggagagtcacttgatgtcaggaattcaagaccagcctggcaaacgtgacaaaaccccatctctactaaacatacaaaaattagccaggcatgatggcatgcacctgtaatcccagctacttgggaggctgaggcaggggaatcgctggaatctgggaggcagaggttgcagtgagctgagattgccccactgtattccagcctgggagacagagcaagacttagtctcaaaaaaaaaaaaaaaaattgaattacctgagactgggtattttataaagaaaaaaggtttaattgccaggcacagtgactcacacttgtaattccagcactttgggaggctgaggcaggcagatcacaaggtcaagagatcgagatcatcctggctaacacgatgaaactccgtctctgctaaaaatacaaaaatattagccgggcatggtggcgggtgcctgtagtcccagctactcaggaggctgaggcaggagaatggcatgaacccgggaggcagagcttgcagtgagccaagatcactccattgcaccccagcctgggcaacagagccaagactccatctcaaaaaaaaaaaaaaaaaggtttaattgactcacagttctacaggtcacacaggaagcatggctagggaggcatcaggaaacttacaatcatggtggaaggtgaaggggatgcaggtacatattcacatggctggcaggagagagagtgaatgaagcaggaggtgctacatactttcaagcaaccagatcccttgagaactcttatcgcaagacagcactaggaggacggtgctaaaccgttagaaactgcccccatgagccagtcacctctcactgggccccacctccaacaatgggaattacaattcaacatgagatttgggtggggacacagaaccaaaccatattatgtatgtatatttgtttcagtgaaattttctgttattaacatagttttatattctggggacaagcagaacacatgcttcattttgttgtgttaaatgtagcccctaaacacaaagcaactatttcatcagtgatgtaactaaagaaagagccaaactcagtggctcatgcatgtaatcccagcactttgggaagctgaggcagaggtatcgcttgagtccaggagttcaagaacatcctgggcaacgtggtgaaaactcatctcttaaaaaaaaaattagccaagtgtggtggtgcacatctctagtcccagctactctggaggctgaagtgggagaatcacttgagcctgggagattgaggctgcagtgagccgaggtgttgccactacactccagcctgagtgatccacctcggcctcccaaagtgctgggattacaggtgtgagccaccaggcctggacactaatagtattctttttttatttttatttttattttttattttgagacagagtctcgctcagtcacccaggctggagtgggagtaatctccactcactgcaacctctgccttccgggttcacgtgattgtcctgcttcagctttccaggtagctgggattacagatgtgtgccatcactcacaccgggctaatttttgtatttttagtagagacggggttttattctgttggtcaggctggtctcgaactcctaacctcaagtgatccacccgcctcggcctcccaaagtgctgggattacagacatgagccaccatgcccagccactaatagcattcttaataacgattttctttggttattcagttcaggctttgttttgtgaatgcctcctacacacatacacctacacatacacatacacacacacacacacacacacacacacacacacacacacaattatataacatggtgagtatttagtgagtatttctctaatctgcttaaatgatgcagggctttctcatactgactcgtattgttctagccaagcagactgagcatttgaaataacattttaggatgcccaaagacaggggtactggaaattaattcttgtggccttgcttttttcttatacactctgaatgagtctatttatcattcaatattttgaattgcagagaaacttagataactgaaaggaatacctcagcagaatgtaggcttctctattttgttcttattaaattatcaaagaagaaaatgaacatgagttatttaaaatgattgtccttggaggcctttgggaccaagtcatttaaatggactgataagaaggtggcccgttttgtgtcttgatgaccttcctgagaatggctggcacagacagagatttttttctcctcagacctaacctgatttcattctgtttctgcatatttgccaacctgattttattctgtgtaacataaaggggaaaatgtgaaaaccagttcctgtcagtaaacctttaaaaattatttaaaaacccaaccccttacagtttgttaagttcctaatggtttcttccaatgaagttttcagtttactgattttttttccactcagaagaaggggctgtgaagtcaagagtgtaagacagcgtgggttaactgttttaagttctgtttctgtgaaatgtattctattcatgtttacagagcaacagaggaaagcttagagaattaagtacaccgtaaattcaaccacagaagcttatgagtagctagattaacttcaaaacaatcagtaaataaatattttaaacttccactgacctttttaaaaatctacttccagatacgttgtttgaactattctcataaattagtcatcttgcaaaacagctgtgacaatatgatgtaatgaagagagcaatgatttagcagtcagaaggctgggagtccttgtcttggctcattcacagggagatcacatgacatgccaaagtcccctagataagggagccatacatgagaggattgaggattgggtcaatgatctatcataaaagactttctgtgagtctgtgcttacacttagaaacctcacaaagaacacaccagggaatttgggtgagagcaggagcttcagctcatgcagaatgcagtgttattttagagttgtgttgcgactcttaggcttagaagacagaatgtctgagtcaggattctgttgtgtataatggattgcactctcgttggcttagacggaaaagcgttaaatggcttgcagaattgttgggagggctgagcttccaggagcagctcccaaagtctccacacagaattggaccaccagggaacctgctccctccaccaggacaggagccttaacttcagaaagctgcccacccagttggaaaggtgccaccacagttaccagcaccagaagcatcttgtctctgctacagtctctgtgcacatagtgaacgccctgtgccctgcctctctccccctgactcaggtgccactccgggtctcgctcaagtctttctgatgatggaacttaaatcacgcccaaaatcccagctgcaggagagctctgagatttcatctttccagcctctgtgtgccacgtggggtttggagcatttgccaacaagccaatccactgcattcaccattgacaataagcaaaatgtttatgatcagtaacatttgcattttttcacaatttgcagcatacagacttcttaattagagctaatgtcaagtcattctacatataaaaatatcatttttgaccgtttctcaagaaacagctttttaaaaaatcaagagcaatgcctacattatttcctgatgcaaagctggtagagaaaataggatgttaaatttagaatttcccttccagctttgtttattttctccacatcagctctgttttcctctgtgtctttttctcccatggggacgtcttccaccttttcagtttgatttgacctttgccgtgcagacctgtggatgaagagccagagtcccccaaggtcgatgctgctggccagtggcctggtgtgtgtgttaacagaacatctccaacgccctcagagcccatgaccaccataagtcactcatcaagtcatttgacttgggatgccctggtatttaatcatttttttctataagcaaagttccacattcaaactttggcccgacatatcaaacgtttcttgactgtaccctggccccacgttgttaacaaccacaagggcactttccaggtactaccacatggagccgctgcaggcaggagcctggcccaggctccggggaggcactgatggagagcctgactcatgagtaacacaaaagcagcctcttcctctctacctcttcctcctctccagttcctgccttgcctcatttcttttctgcctctcatagccattaaattcaggtcactactatttgccattttcttatttcatgagaaatagcacggtcagccagaggcttcatctccaaggaaaccaggcatcacaactgtgcacctgacccttttgtaggcacccttggccatccccatcttgcagcctgctagacatttttctacctggtcttgtatgtgagcacctgtgttgatctgtcacttctgatcttggtgtgctcccaggtttcctggaattttctgatagactcacaatacccctttagtcatgtttatcttcatgtatgagaaagatgcatagctatacttcatacatatactgtacacataaagatagcaaatagaagaaacaatatgcatctgtccactgtaacagtatctttcttcctggacttcaatgaacatgccattgtattgaaagactctagtagggtgggcgcggtggctcacgcctgtaatcccagcactttgggaggccgaggcgggcagatcacgagatcaggagattgagaccatcctggctaacatggtgaaaccccgtctctactaaaaatacaaaaaattagctgggcatggtggtgggtgcctgtagtcccagctgctcaggaggctgaggcaggaggatggcatgaaccgggaggtggaacttgcagtgagccgagatcgccccacttcactccagcctgggcaacagagcaacactctgtctcaaaaaaaaaaaaaaaaaggctgtagtaaaaattaatcctagaatgtacccggttattatctctgctaaaatagtttgcaattaaattaaatgaagattaaactacacatattgaaagacatgaaagcccagtgagtgagtcagtgaaaatgggaaatgaattaacagtcacagtttgtgcaagaactttcctgttccttcctcccctaggcacctcattatttaaacatattcgttttactcagttgtcctacatctaggactggcctccactcagctaactcctcctcccctctcatttctccaattcagctctagtccagaggagaaaagaataataaatatcacactaaacaccatggaatacttctcaagtcaccaaagaggtaaatcaaaaagtattatttgctattttgaactggaacaacatgtaaatgttcccatctcttttcttggcagatggaactggacagaatacttctgtccataaggcccttagaagccccctaagcgaaataccaatgaggacctccccagcagctgctgtctctcctgccaggtagatgagccccaggaataaccactgcttatggtttgttgtatatccctctagatgtttttctttatacatatgtgtgtgtgtgtgtgtctgtgtctgtgtgtgtagagagagggtgtgtgttgtgtaaattggattatactacacgttagtccaacacttactcatttcactttatcattggaatgtgagctccgtgaggaccaagatttttgtttattttgcttgctaacacatcttttgtcggtaacagggagtgaaacatggtcacatcatgatagaagctcaacaaatatttgttgaatgaataaaggaatatgtctgagacatctttacattgcaacatttggagaaatgattcctttttgtaaaggttatataatacacatcaatttatatagccatacttctactgatagattttaggttacttggggtaaacaataaagtgaagatccttatgcaattttttgaccactaaaggggctatttctgcataagggtggatcaagattcatttgcaaatatgagagatcactgtagttaagcagaaagggatttaatccagggcatttggtactggaagggctggagaaggcagtaggctctgtccactgagcttccaggaagggttcccagagcatctcaatgctggtccagtaaaggagcttctgttcctgccagaatcaggaagtctttctgtaggtacatgcccaggtccaccactgctgccaagatctaggatcagccttgggaccacacagccacaggtgcagtccatgccagcacaccatgctctgtgcctgcctcatactgcccagaagatgatggaacagacctaagaatctccacttccctgccacagaacagcaaatgccttcccagccatgcttgccaggagaagctgcagaagggcagctttctactccctgtaccttccacgtcctctgagaaggggcctgtttgacagaaactaggccacttaataagccaagctttaaggactttggcaaatacaccccttagctttccagtctcatataagtcagtaaatcacccttcaaagagacaaggatggaatcaagtgagcctgtcctgagatcttccacacattgattcctagaaaaggaaaatggagtcctagaaaaggaagtgtatttgacctgtcctggcacgttgaaaaacttgatagacacattgccctcagtttaccctcccactcataccatgcaaggtactgttttcccagaattttcacactctataaattttaaagattaagtaaatgaacaataataacttgatttactttgtccttcagtaaggttgagcacttcgtatgtttacagacggtttattttttatatgtgtgaatgaaaacttacatactttgcctgtatttattttgaggtattagtctttttcctatttgtaagaaatcttgatatattgtgctttttagcttttttatatgtaatgctattattttctttgaactttctttgaagttatattttactgaagaaaaatgttgcatcttgtattcagtgctttcctttatgattttaagtgttttgtttcctaccttaaaaagacctttctagctattagattatgaaaatattcttccttaacatcttaaagaagtcttttatttgttcagtcttaaaacccatagaaacatgggtttgaatttaagtgatctttccctatcttaactgacttctggactcagaaataaatactctttgaaggaagattacatcatccagaacctcaacttatagccacattaaaaaaatatatggtgtcatagtcaatttaaaaaatactaagtatacaaatagataataccaaatgatgaaaaaaacaagagaaaactaggcaacagaaacagacacaggagatccagatattagacacggactttaaaacaactgagattaatccagtaaagaaaataagtaacaaggtggataatttcagcagaaaaccacaatctataaaaaagaatccattagaaatgttgtaacttaaaaataaaatgcctaaatttaagactcaacaaagtttacctgtagattaaacattttcagagaggcttaaggaactaaagacaagttgatagaaatatctgaactgaagcgcagagaaaacaaagaataggaaatagagaaaaggacataagagctacatgggatggggtgaaaagatctaatgtgtaattggagtccccaaaagggaaaacaagaaaaacaagacagatagggcagaagcagtattggaagagataatggccaagaattttgaaaactaaacagatgttaagccctagattcaagaacaacatgaaccgaaagcaaagtaagtgcaaagaaaaccacctagacacattaggctaaaactgctagtaatgaaagagaaagcatcgtaaaagcactcaaagggaaaaaagaaaccttaatatcaaaggagcaagagctaaaactgacatctgccttctcaacaaaaatgatggaagccagaagacaatgcagtggcgtctgcaaaatgcagaaggaatgcctgctttcctagaataccgtacttggtgaaaatacccttcaaaggtgaacacaaaaggaagatgctttcagtacaacaaaaacagatttcttttttaccagtgtacttgtgatgaaaagattatcttaaaaagttctgcatgaagtttgttcttttaaaagattattaaaattgatgaacctctgacaaggctgatataaagaaaaggtataaattagctatatcaggaatttttaaaggggtgtatcactaaagatcccataattatgaaaacagtgatgaggagattacagattagtgctctgtatagtactactctataaattagaaaatgttgatgagatggtcaaaatcttagaaaaacatcacttactaaactgacataaaaagtagtaggaaatcctgatagtctgtaatttaaataattttctcaaaggaaatgccaggaggcccagatggtttcatcatgaaatctcccaaacatttaaggaagaaataacaccaatcttatatatattcatacagagactagaaaaagactagaaaaaaaggtaaactttcttagatcatttaagaggccagtgtatcttcgatacctaattcttgcaaggacattaaaagacaggaaaattaaaaggtcagtgtctctcatgaacctccatgcaaaaatccagaacaaaatcttggaaaacctaattcagagatacatttatttatttatttacttatttatttttgagacggagtttcactcttgttgcccaggctggagtgcaatggcacgatcctggctcaccgcaacctccgcctcccaagttcaagtgattgtcctgcctcagcctcccaagtagctggtattacagccatgcaccaccacgcctggctaattttgtatttttagtggaggcggggtttctccatgtgggtcaggctggtctcgaactcctgacctcaggtgatctgcccaccttgacctcccaaagtgctgggattacaggcgtgagccaccgcgcctggcctcagagatacatttaaaagatcatgttaaattgggtttattcgaggaatgcaaggtggttttaactactgaaaccaaccacagttaatttaccacattaacaaaggtatataaaaagtatagtcatcttagtagatgataggaaaatatgttcagtaaagattaatacctttcttaatgaaaagtcttagaaaactaggaatagaagggcaattccttaatctgatgaagggtctctattatatatctacatcatacgtcatacttaatggtgaaatattggacgctttcccacaagattatgaatgagataggaatgccccatattgtcacttttgttcagctcatttcaaaagcaagatataaaactacttttgaaaactgtataccattatatttatgtgagacatggatacatggaattgtgtttaatgcgatgtggagtaggacctctaagggaaagaatgctttggaaaacctcacaatggccctcctcactcatgtgcacagacagatgtaccaggatattcgtttcctaatgcttatatcaatatcaatgccagtattaacagagaatcgatcaaataaattatggtaatgaaaatagctaaaatctactgaatgtctactatgtaccaggccatgttttgattgttctaactggatttaactcttttttttttttttttctttttgagacggagttttgctcgttgccctggctagagtgcaatggcaccatcttggcccactgcaacctccacctcctgggttcaagcaattctcctgcctcagcctcccaagtagctgggattacaggtctgcaccaccagacccggctaattctatatttttttagtagagatgggattttaccatgttggccaggctgctcttgaactcctgacctcaagtgatccacccgcctcggcctcccaaagtgctgggattacaggcatgagccaccacacccgaccagatttaactcatttaatcccccccaacaatcctctggggtaggtactatttatatcagtgccattttatagataaagaaaatgaagcacagaggatgaagtaacccagagttgtgcagctggttggtggctatgtggccccagagccctgtgcttggcctcttgtgtaacacttcccatgagaagccaccaaaaaggtagatagagaatgaccagtaagtgaaagaagcaaaacggtatgcaaagcaatggaatcctgtgataacatttgtgtttttagaataacagagggtttttcttcaagggttttccttgaataatatcactctcacctgcattctgaaatgcttttttttaatggtggtaaaacaaatacaccatgaaaactaccctcttaacaaatttttaagtacggttaactataagcacaatgttgtacagcagatctccagaaactttttctaaaatttcaactttatttcagattcagggtacatgtgcaggtttgttacaatgggtatattgtgggatgctgaggtttggggtacaattgatcccatcattcgggtggtgagcatagtatccaataggtagtttttcaacctttgcccccctccccattctaccactctccaatgtctattgttgccatctttttgtcctctagaacttttttatcttgcttgactgaaactgtacccactgaacaactccccacttgccctccccacaacctctggcagccaccactctactctctgcttctctgagtttgactactttagattcttcactgatacggtttccctctgtgtccccacccaaatctcatctcgaattgtaatctccataatccccatgtgtctagggagggacttggtgggatgtgatggggtccatttcccccatgctgttcttcggatagtgagtgctcacgagatctgatggttttataagtgtttgacagttcctggttttataagtgtttgacagttcctcctccacatgcactctgtctttctctgtccccgccttcccccaccttcctcctgccaccttgtgaagaaggtgcctatttccctttctaccatgattgtaagtctcctaaagcctcctcagccatgtgaaactgtgagtcaattaaacctctttataaattcccagcctcagggaaggtctttatagccgcgtgaaaactgactaatagtgtaaatttgtagcagtagagtcaggtactgctataaagatagcctgaaaatgtggaagtgactttggaactgggtaacaggcagaggttagaacagtttggagggctcagaacaagataggaagatgtgggaaagtttggaacttgctagagatttgttgaatggttttgaccaaaatgctgatatgatgtggaaaatgaagtccagggtgaggtggtctcagatggggatgaggaacttattgggatctggagcaaaggtcactcttgctgtcttttagcaaagagactgatggcattttgcccctgccttagagatctgtggaactttgaacttgagagaaatgatctgaaattggaacttatgtttcaaagggaatcagagcataaaagtttggaatatttgcagcctgacagtacaatagaaatgaaaaaccaactttctgaagagatactcagaccagctgcagaaatttacataacaaggagccgaatgttaatcaccaaaacagtgggaaaaaatgtccccaggacatgtcagagatcttggtggcagcctgtcccatcacaggcccagtgacctaggagttaaaaatggttttgtggcctgggcccagggccgccctgctctgtgcagccttgggacttggtgccctgtgtcccagctgctctagctccagtggtggccagaaggggccaatgtacagcttgggccattgcttcagagggtgcaagccccaagtcttggtggcttccatgtggtgttgggcctgtgggtacacagaagtcaagaactgaggtttaggaacctctgtctagatttcagaggatgtatggaaatgcctggatgaccaggcagaaatctgctgcagggatggaaccctcatggagatcccctgctagggcagggcaaaagagaaatgtgaggttggtgcccccacacagaacccccctggggcactgcctagtggagctgtgagaagagggacaccatcctccagaccccagaatggtagatccactgacagtgtgtaccgtgcacccagaaaaaccacaggcactcaacaccagcccgtgaaagcagctagaaggggtgttgtaccctgcaaagccacagggatggagctgcccaagaccataggagcctaccccttggatcagtgtgacctgatgtgagacatggagtcaaggagatcgtttcagagctttaagatttgatgactgccccactgggttttggacttgcctggggcctgtggcttctttattttggtcaatttctcccatttggaacaggagcatttattcaatgcctgtactcccattgtatcttggaggtaactgacttgtttttatagcagtgtgaagtggactaatacactcacatacatggaatcatgcaacatttgtccttctgtgaccggcttctttgacttagcataatgtcttcaaggctcatttatgttgtagcatgagacaggatttcctttttatgggtgaatatctccattttatgggtaataatattccattgtatattatgtaccatcttttcttcatccattcatctggtggtggacacttgggttgcatccacctcagcttttgtgaataacactgcaatgatcatgagagtgcaaatatctctttgagattctgttttcaattctttgggataaatatctagaagtggcattgctggatcatttggtagttctattgttatgtttttgaggaacctccatactgttttccgtaatggctacaccattgtacgctctcatgaacagtgcacaagggtttctctgcctcctcaccagcacttgtttttttctgggttttgatgatggccttcctaacaggtgtgaggtggcatgtcactgtggttttgatttgcatttccctgatgattagtgatgttgagcatcttttcatatacttgttggccattcaaaatagagtgcttttacacacgtccttgaatatacagagaacattccaggaaagatattcacaaagctgattagtaatgagcactcttgggaaggagaactggggtgcaggagtgaaagggagactttctcttcactatttgccctttttgtttcttttgaggattgtgtctattgcatatattacctatttgaataaatgagttaattaaaaactcccccagttattccactgtgtttaagaactgttggacgcacacacgcgtgcgcacacacacacgcacctgtgttggtgctgttcttgatgttacaagctcaccattctgttgcccccctggtttttacagaggcatctggcttagagcagtgtgcagtcggccagcaaagggatgactcaatgcttgaaccttcctgaccttccccttacaggtaaattatatataaacataaaagacttttgacttactgcagtttcaaccccagaataatggacgtgtcatggacgttagatccagcagtgcagctgacacaaggaataagtgtcttatctcctgccagctgcacctctcagtgtgcttgtgctagggagacagaaactttgttgctgatttttttaaagacatagggtcttgctttgttgcccaggctggtcttgaactcctggcctcaagcagtcctctcacctaagcctcccaaagcactgagatgtgaactaccaagcttggccaaaaaaaccattcttttaattgccaagatgcatactaaagttgagaccacaacaactattgccctgaagtaaatacctcattgacagtactccccacttagccccctccaggcacctgtctgcttggatgattctatttactgtaataaaggatcacagtgacaattgcttgcttccagcaatccccagaagttgcttgtcaacattgagatcatcagaagctgcagaaacagggattaatgggctgtttttgttgttctctttagtgacgtaaatactgtttttctctgctatttagagctaattagccccactcccaactttagtacccataattggtggctgtgagctgtagaaggattgttttcttccgtgactgtttgtgggtcatgggcagcaactgtgggcctggtctctggcttgctatgtagctctaaacaaggcacttagttctctcagctccagtttcccctataactataaactagacaatcttgaaaggtttatcctgttctgtatttttatggtcctttacgaaatatcatctgaccaggtatcatggcatgctcctatagtcctagctactcagaaggctgaggtgggaggatcacttgagcccaggaggttaagtccaaatccagcctaggcaacatagcgaaactccatatctaaaaaagaaaaagaaatatcatctggaggattcagtctatttcattatctgttttgattgtgactaatatgacagcagaaagagccttgaaagaattaagggaggagaccacccctcatattgtcttatgcccaatttctgcctccaaagaaagaagtagtaaaaactaaaaggcagaaatgaaatccacagacagcccggcaccacaccctgggcctggtagttaaaagatcgacccctgacctaatcggttatttgcataagaaaagcactgtgaagcactgtcctgttctgttccgttctaattactggtgtatgcaacccccagtcaggtaccccctgcttgctcaatcgatcacgaccctctcacgtggacccccttagagttgtgagcccttaaaagggacaggaattgcttactcagggagctcggctcttgagacaggagtcttgctgatgctcccagacgaataaaccccttccttctttaattcagtgtctgaggggttttgtctgcagctcttatctgctacagaatgatttctgcttttttattgaaccgggccctgtggctggaatggcctttctcatgtaaaaaagttcttcttggttcccagtttccttcttgcctgccgctgcctgtgacctggtcatcacattgaggcattttcctgccactctgtctctctctctctctctgatgtctgtcaattaaaacattacctgggggcaggtaatgtctttccccaggtaagggcaatttcataaggtgcatgctgggtttaatgctctgatgacatcgtcttgaaattcacaataatttttgaacaagggttgatttgcatatagatcctataaaggaagtggtggtcctgcctggagaatccacgtccctattgcattttcattacatcagaagcatatatatgtttatacttgaggataaaatgagaactgtgttgtactggagaatgatgtttgatggcaatcaagagcctcttcttcaggaataggtgattatgtggtcgttcccaccgatctttgaaagggaaggacctaggaactgaagccagacccccacctctgcaagagttccttgctggagtcactcagcagacccccactctctggactttggggacatgagactgctgagcacctccaccagagggaaagtggaagtggccccaagaaagagggaaccacgaagcagtttcaggtatcatgtctcaaacagtaagaaatcagaaaaacatagggctgatcagctttgattgttccttctgttttgtcctcctggacaattgacttcgacaaatacttgctgcatgaaaataattaagatgcagtgcccgtcttcagtgagtttaaaaggaggatgctggacagtaagtagtgtgcaagattaaattaagagctgtaaaaagacaatactaaataggcaaagtacttgagagttgttagttggcataagaaatgtagagagaagtagaagttcagggaatggggtggtaatgtgtgtctggactagactgggcttcctaaggccagggactctgccatatatatgcatggtaggctctctgtcagtatttgttgggtggatggataggtgactaggacattccagctggaaggcaggttggagccatattgcaaatcttcattgctaaggaagaggtttgtgctttattttgataaagcactgaggagccaccaagtttgtgggattttattcctgtttttgagttatggtacagtgagattggacccatattttaaggaggagtcatcagaaaacagtggcatgtaaggattagagaggcattttgaaatcagtgtttaaggaggactttggcagggatgtgaaggagggcttggcagagggcaggactgcaagaccaacagggtggtccctaagaggtggtctttgctgccacacctctgtcacctcctcccttttcagtgcccctggtcacccaggttacagcaaacctctttcaactgtttcctctctcatgtcttcctgcttcttcatgttggttaatcttctgaagcactgagcacatcctgctgcagaccttgcagaaatttcccatgactctgtcctctgcactcctcatcctgatcttctagatgctccactacttagcaccacccctgcccacctgccagaatggcccagcctctccctccacctgaacctgttttagtccgtgccttagcaatagtgcacaagcatatttgagtgtaagtctttgtgtataaggttctaacttgaattgtcctccttttgtcctttcacagtctaaatactgttctctttatttaaaggtcaaaactttcatgaagttatagctaacacctggcagcattgacagctcccttctcccttttttttttctttttcttttcttttcttttcttttttttttttttttttttttgagacagatcctcactctgtcaccaaggctggagtacagtggcgtgatctgggctcactgcaacctctgcctcctgggtccaagtgattctcatgcctcagcctcctgagtagctgggattataaaggcatgcaccatgacacccagctaatttttgtattttttttagtagagacaggatttcaccattttggctaggctggtctcaaactcctgatctgcccacttcagcctcccaaaacgctgggattgcaggtgtgagcctccatgcctggccaacatctcccttctttgactttggtgtcttacgctatttcaggtgtttaatttctgtactgctttgtggtgtggataacttctgcacaatatatgccttaatctccatttatgctgtaatttagtggacagtaaatgttcagcttacctttggtatctctcccagccccttgcattgtgcaacacacataacatttcactcagtaaaacttacgaatgagtatgctcattcatatacaatatgaacgtattgtttatttatcagtatacaaaatcggctacttttggagtaatagcttttttttttttttttgggagacagagtctcactgcaacctctgcctcgggttcaagcagttctcctgcgtcagcctcctaagtagctagtagtagctttttaatacatattatcattactaataagggtactatcaaaggatttatgaaagtctgaatgaataagctaggacttattgttatacctttggatgtagcctatatttgcacccaaatagatgaagtcatatattttagaggtttaatttaaagccccagatattacatattgtcctgtttatgtgcgcgagatttaaataatcaaaagaggttttaaaaaccagaattagtgctattctaaaattctccttttcattataccagaaatgcatacaggaaggctatgggtatattaatatgcttctgatattttatctttcatagtgaaaagttaaattagtaaaatcaatttatttcaattttacatttatctcattgagataaagcaatggcaggatatctggtatttttaatatgcccttccaatataccttgaaaaatttttttttattttttagagatgggggtctcgctctgttgcccaggatggagtgcagtggtataatcataattcactacatccttgaactcctggcctcaagcagtcctcccacctcagcctcctgaatagctgggactacaggtgtgcgctaccatgcccagcttatttatttatttatttatttatttcagagttgaggtctcactatgtttctcaggctggtttcaagctcctgggctcaggtaatcctcctgcctcagctttccaaagtgctgggattacaggcgtgagccactgtgctgtgcccgtctctaccttttaaatgttatttagatactgatgtagtcttgaaacctgtagaatgcttttgtatagatacccttaattcaaatgagtttgaattaaagttctagcctgaattatatttacacaaataaaagactagatggatgagcaacagatggattttaaaacaaaatgtagcaaaactctccccagactcatgacagtcaggaggcacaatttcatgtttatttcacactgtgagacatcaaatacattattaatgtaactaatgtggttgtttcttcagattctggctgaataaaccagacatttgcttttctaaagtaggtatttagttcttgtgaatttgaggattctaaacattagcatcttctccttaacgtgctcttctctctaaccagtgtggaaagaagaaaccctctggtggccttggcccgggaatatggcggtttcaagtgcaatgctgtactgaaatggtaccagaagaagacagaaggttacatggtaagggacaatgtcagccagcttccaccagccctgggcagtagtaggcctgtgccagtacatgttccatgtgtgcctgtgcttggtggaccaatatgcatgtaattatcatctttctgttctcctagacagagaggcatatgcaacgggaagccagtttgcactcccaccaaacatatgggtgtatgcagagctgcatctccctagggaagggggaccttttcctttgctcaaagtgttaccgatcatgggttcttaggctcttgatgcaatagaaattctcaccaggccaaaagagttttcctagcaaggctttattggagcatatgcccaggcacaagggaggaagcacaggagagggaggattctctggctgactccctgaaatgagctgatagggatttcttttattaggcaatgtgcggaaattgatgtcaaggtagggaatgtgggctgggcagggtagagaacgtgagggggaggggacatgggtcggcttatctgctggcaatggttgtcttgagtaatgggccatctggtgctctggttagtggcagcaaggctgtatgaatcagttgtttagcattccttcctgaggtgggatacttgcaaccttggttggatattttggatctcctaaggccagttcctgtaatcctttaagtaaaaggcaaggttaaacattatgagagcaccgaagaacaatatagaatggctgttttctttgcgtgactgttagtgggtatggcatcagtgaggtagtggtgtgggttttgtgatcagtgggaatgcatgaaagaatgctgtagtggggcctccacccaaggagacagcttttgctaaattacactcccaaagaagagtgctttgcctaattcatataaaggccctacataaatgagcctccaaaacttctccaaatattttctttctgttgctttcagagttgtttgcatttagtttaaagagtttttgtttactaggacagtatctgttttctgttcagaaaaggaattaatacctggtataagtttaagttttttgtgcgtgtgaaacactatacacaaagataaaaatgcacaaaatataaactatagtgttttttttgttgttgttgtttaagagacggagtctcattctgttgcccaggctggagtgcagtggcgtgatctcggctcactgcaacctctgcctcccgggttcaagcaattctcctgcctcgacctccggagtagctgggattacagtcgtgagccaccacacctggttaatttttgtattgttactagagatggggtttcaccgtgttggccaggctggtctcaaactcctgtcctcaggtgatccacctacctcagcctcccaaagtcctgggattacaggcatgagccaccactcctggcctcaaatgatagtctcttgaactatgaggaagtgaaaagtcacacagtcaccactcgcatccagaagaagagcatcgccagctcccacagacctttcctacaactttcccatcataacccctcactactccctaagataaccattgtcctcaattattctccttatggattttcacaaaagtatgcagccctgaatattatgttagtattgcttgcatttgaattttattataaatggaattttaaaaactatgtaattttgcatgtatctttttttttttttggttttagggagcggaaagtttaataggcaagaaggatgggagaaggcagaaaatggaggctcccctgtacagagacagagggaggggagcttttttttacacagtattgaatcagtgagatttattcatgttgtcacctatactgtaatttgttcattttcttcaccatttagtaacccattgtaggattatagcattatttagttacccattctattattgatagatcgttgagtcaagtccagtttggggctaaggtgaatagcgctgttatgttcttgtcgatgtctcttgaaacacatatgtgcttgttcctgttggttacatccttcagaatggaattcctgggccttagggtatgcatacattctaggatagtaccaaacagatgcctgaaatatttgtataatttatgtcttttcagcaatttatgagaggtcaatttctgtgcattttcatcaacacttggtagcatcagtctttttactggaggtcatgtgggtaatgtgtagtagtgtctcattgaggttttgatttgcatttttcttttggcagtggagattgagcaccttttcatatgcaaattggccatgtggatagtcccttttgggatgcacctgctcaggttttttgcccactttgtttgtttggtggtggggagcgggggtattggctctgtaaacagcatatgaacttttgtccattttaagaatcagatgtcattctcttccttattgcttttaagaattctttatatattctccatgtaagtcctttgtcaaatacatatatggcaaataccttcttccagtgtgccttaaattttcttcttttggctctccctctgcctctgcctctgccgctgccgctgcctctgccgctgccgctgcctctgcctctgccgctgcctctctttccacagtctccctctgatgccgagccaaagctggaccctctgcctctctttccacagtctccctctgatgccgagccaaagctggactgtactgctgccatctcagctcactgcaacctccctgccggattctcctgcctcagcctgccgagtgcctgcgattgcaggcgcgcgccgccacgcctgactggttttcgtatttttttggtggagacggggtttcgatgtgttggccgggctggtctccagctcctaactgcgagtgatccgccagcctcggcctcccgaggtgccgggatggcagacggagtcgcgttcactcagtgctcaatggtgcccaggctggagtgcagtggcgtgatctcggctcgctacaacctccacctcccagctgcctgccttggccccccaaagtgccgagattgcagcctctgcccggccgccaccccgtctgggaagtgaggagcatctctgcctggccgcccattgtctgggatgtgaggagcctctctgcctggctgcccagtctggaaagtgaggagcatctctgcccggccgccatcccatctatgaagtgaggagcgtctctgccaggccgcccatcgtctgagatgtggggagctcctctgctctgccgccccatctgggatgtgaggagtgtctctgcccggccgccccatctgagaagtgaggagaccctctgcctggcaaccgccccgtctgagaagtgaggagcccctctgcccggcggccactctgtctgggaagtgaggagcgtctccgcccggcagccaccccgtccgggagggaggcgggggtcagccccccgcccggccagccaccccgtcgggaagggaggcgggggggtcagcccgccgcccagccagccgccccatccgggagggaggtggggaggtcagccccccgcccggccagccgccccgtccgggaggtgaggggcgcctctgcccggccgcccctactgggaagtgaggagcccctctgcccggccagccgccccgtccgggaggtgaggggcgcctctgcccggccgcccctactgggaagtgaggagcccctctgcccggccaccaccctgtctgggaggtgtactcaacagctcattgagaacgggtcatgatgacaatggcggttttgtggaatagaaaggggggaaaggtggggaaaagattgagaaatcggatggttgccgtgtctgtgtagaaagaggtagacatgggagacttttcattttgttctgtactaagaaaaattcttctgccttgggatcctgttgatctgtgaccttacccccaatcctgtgctctctgaaacatgtgctgtgtccactcagggttgaatggattaagggcggtgcaagatgtgctttgttaaacagatgcttgaaggcagcatgctcgttaagagtcatcaccactccctaatctcaagcacccagggacacaaacactgcggaaggctgcagggtcctctgcctaggaaaaccagagacctttgttcacttgtttatctgttgaccttccctccactattgtcctgtgaccctgccaaatccccctctgcgagaaacacccaagaatgatcaattaaaaaaaaaaaatgtcttcttttgatgaacaaagttcttaattttaattaagtctaatttatcagtctttcctctaatggttagtgctttttgtattctgtataagaaattgtttattcatggccgggtgtggtggctcacgcctgtaatcccagcactttgggaggccgaggcgggcggataacaaggtcaggagatcgagaccatcctggctaacacagtgaaaccccgttctctactaaaaatacaaaaaaaaaaaaaatagctgggcgtagtggcaggcacctgtagtcccggctgcttgggaggctgaggcaggagaatggcatgaacccaggaggtggaggttgcagtgagctgagatcatgccactgcactccagcctgggcgacagagtgagactccatctccaaaaaaaaaatacaaaaaaaccccaccaaatagcacgtttttaaagggtatgttttgtggtgtgtgatttatgtaccaataagttatttatttaaaaataataaatatagtttgaagggcttaagtagagggatgaggaagatgttgggagggagtacatcgggtggagtaggagctgccatttaaattataaatattatcaaactataatttaaaaaatttacatgtattactttgtatattaaaaaataattgaaggccaggcacagtggctcatgcctgcaatcccagcactttgggagcccgaggtgggtggatcccctcaggtcaggagttcgagactagcctggccaacatggtgaaaacccgtctctactaaaaatataaaaattagccaggcgtggtgacgcacaactgtaatcccagctactcgggaggctgaggcactagaattgctcaaactcaggaggcagtggtggcagtgagccagaatcatgccactgcactgtagcctgggtgacagaacgagactccatctcaaataataataataataataattattattattattgaagcaaaacaataaagtagaagagatagatgcaagttattagtaatctagtttttacttgggaggcaggattcacaagtatttattttgttatcgtcattcataatccaagcatattctttgtatcaaaggttatattatgacctataatttggaggtggaaaatctgaaggaaaggccatgaagaagtattgtggctaataattaaaccagatgctttctgagaaaagatttaaaagggagaaataaaacccatgaggagggtgctctcctgggatgacagcgtcaggaatggacctgaggggcctcttgagctgggcacaatccacagtgctgctatcccacttcacagccctgtgacaattcacaagtcagttagttattcctaaactgttactttttgaattaaaatacacacataaaagagtgataaaaacatttttcagaaaaatggcatttttccaagtggcttacctaaaaatgcccttagcctgaattgcatatactgtgttataactcagaattttctcattttgacatggtcccttcttattttataaagataataaaagtgatcattttatatcatcaaagcttttgcaatttgaaatagtaatgatgtgagtgatactgttaaactagatttaagtcttgagtcagatgaatggcaaatccagcccaccacatgtttttgtaaataagtttcgtaagcacacagctccacacattcatttacatattctctagaactgttttttgctgcaactgcagagctgagtagttgcaacagaaatttttcagttagatgacctaccaaactgaaattatttacaatttgaccctttatagaaaaaatttacttagatgaagatatatattaggttggtgtaaagtaattgcgttttttcccattaactgcaattacttttgcaccaacctaatacacatgttccttagatgaagatacatgcaagtatctcctgtagttcaaatcctatttggggcctggcagggtggctcacaccagtaatcccagcactttgggaggccaaggcagacagatctcttgagcccaggagctcgagaccaggctgggcataccaataaagttagctgattgtggtggcacatacctgtagtcccagctacttggaaggctgaggcaggaggatagcttgagcccaggaggcagaggttgcagtgagccaagatcgcgctactgcactccatcctggatgacaagagtgttatccaaactgaatcttgttttaaatctggaaagaacacccacgttgcaggcaaattgtttttctgtctctgagttctcacagacaagcactaaaatctgcttagccaacagcaagcaacccctgaaataccagcccacctggggctctgtttcttgtcttttttgagagaggtctcttgagggctacatgcacaattcaaaaaacataaatcctttgacttatttattgccgtcagagtggtcctttccctgacttcgttgtgaagatagagccccaatagcagatgcgcggcactgtgggcttccactctattgaggccttttctacctgctctccctgcttctgtgccgtttctgacacagtggcttctgaagtggcacaggcattgtgctacaacctaacagtggagtttgtttgaaaataaagacgaagggctctcccgtgttgtgggagacacagtcctctcctgatggccatgtttctagttggttttctgtcatgagccagtgtgctttggggcacccgctcccactcttagtggtgtgtgcactcccagaggtatgaaactatgaggaataaaaatggctttctgaacaaaaatatcaaacagtgtagagacctgtcagattgttcgcacagcagatggggagggacgcgttctcccactttaatgtacacaaacaccagagaagtagccccaacaagtctaagctgggcccatcagcctcttcctcgggaattttggaaataaaactgagtaagatcaccttaaaatacaaagcccagatgctattggcaggcatgtttttgcctctgtgcagaaaatagttaacccaggaggcctgggatggctctccttagcaaggctgcttgcaaggctggcccttggctggagtctgagaactaggattacaggagggttcacaccattcccagaactgatgagaggggctcacggttctgaaactgtttgtgcaaacacgtggtttgtgctgaacagcggcttatctgtgaggagtctggaatgtggtatatgctgggcagaaggggcccatgtgaccagcccctgataaaaacgctggatgcagagtccctaatgagcttccctcattaattaattaattaattccttgggggaattaaacgtgcccgtgactgctggagaggactcttggaagctcatgcctctggacttaacgccctgcgccttttccctttgcgtatatggctttgtgtcctttcactgtaataaatttgtgcatagctgtggccatgacttcatgctgcgtcctgtaggtcctccctctgatcattgaacatgggctttttattgagccttaaaaaggagtaaggcactgacacaggctgcagtatgaatgttcgctgaagacgtgatgccaggtgaaagagctgggtgcaaaggctacatcttgttcgagtccatttataagaaaaatccagaataggcaaatccacagaaacagaaagcagatgagtgtttgccaggggctgaggggagaggggaatagagagtggggtggctgcttagtgggtacagttttctattgtgtgatgaaaatgttctggactagtgatggtcgcacaacattgggaatgtactaaaagccactgaactatacactttaaactggtttaaatatacagtttggttccattggtcttttataccagtaccatgccgttttggtaactagtataatttgaagtccagtaatatgatgcctccagatttgttctttttggttaggatcgctttggctattcaggctcttttttggttccatatgaattttgggattgttttttctaattctgtgaaaaatgatggtatttggatgggaatttcattcagcagattgtagattgctttgggcagtatgatcattttcacaatgttgattctatgagcatgggatgtgtttccatttgtttgtgtcatctataatttcagcagtgttttgtggttcttcttgtacagatctttcacctccttggttaagtatattcctaggtttttgtttttgtttttgttttgcagctgctgtaaaagggattgagttcttgattgattctcagcttcgtcgttgttggtgtatagcagtgctacttctttgtgtacattgattttgtaacctgagacttgactgtatttgtttatgaaatctaagagtctcatggaagagtctttaggattttctaggtatatgatcatatcatctgcaaatagagatagtatgacttcctcttttccaatccggataccctttatttatttctcttgcctaattgctctggctaggagtttcagaactgttgaataggattggtgaaagtgggcatcattgtcttgttcctgttctcatggggaatgtgttcaacttttccccattcagtattacgctggttgtgggtttgtcatatatccacatatatattattttgaggcaagttcttttatgcctagttgttaagagcttttatcataaagagatgctgaactttgttgaatgctctttccgcatctattgagatgatcatatggtttttgtttttaattctgtttatgcgatgtcacatttattgatttatgtatctatcaacttatacaaaaaatcaactcaagatgtatcaaagacttaaatataagacttgaaaccataaaaatttcagaagacaatttggaaaactcttctagacttcagcctaggcgaagaatccatgactaagaccccaaaagcaaatgcaacaaaaacaaaaataagtaaatgggacctaattaaactaaaaagctctttacagcaaaagaaataataatcagagtaaacagacaacccacagaatgggagaaaatatttgcaaactacagtccaacaaaggactagtatccagaatctacaaggaactcaaacaaatcagcaagtaaaaaacaagtaatcctatcagaaagtgggcaaaggatatgaatagacatttctcaaaagaagatatacaaatggccaagaaacatgtgaaaaaaatactcaacatcgctaatcattagggaaatgcaaaataaaaccacaatgagagaccacgttactcctgcaagaatggccattattaaaaagtcaagaaacaataaatgttggcgtggatgtggggaaaagggaacgcttatacactactggtggtaatgtaaattaatacaacctctttggaaaatagtatggctattccttaaagaactagaaatagatctaccgtttaattcaacaatcctactactgggtatctacccaaaggaaaagaagtcattatatggaaaagacacacatgcatgtttatagcagcacattcacagttgcaaagatgtgtaaccaatctaagtgcccattgactaatgagtggataaagaaaatgtgactgtatatatatgtgtatatatatatatatatgtgtgtgtgtatatatatatatgtatatatatgtatacacacacacacatatatacatacacacacacacacacacacaccatggaatgaatgaaataatgtcttttgcaacaacttggatggagctggaggccattattctaaatgaagtaacacaggagtggaaaatcaaaaatcatatgttctcactcatgagtgggagctaagctatgggtatgcaaaggcatacagagtggtatggtagactttagagactcataagggaaaggtagggagggggattaattttttttaataaaataaaattaaaatatatgtattttaccttattttttaaaagtgtcgtggctgggcacagtggctcacccctgtaatctcagcacattaggaggccaagatgggaagattatttaaggccaggagtttgaaaccagcctgggcaacatcatgagaccctgtgtctaccaaaaaaaaaaataaataataagcaggcgtggtggcatgaacctgtagtaccagctacttaagaggctaaagatggagaatgacttgagcccaagagttcaaggctgcagtgaactgtgatcgtgctaccctactccagtctgagcaacaaagagagacaccatctctggggataaaaaatggccataatgatgaatatcacttatcgtgcctttttatgcttgtgctaaatagttgtgaaatactgctaaatttttgtaaaataagttcctagaagtgaatttgctttgcaaaaggttgtgttatactttccattttaatatatattctcaaattgctctcctgtaaggctatttagtttacgcttctctacacaatgtgcaagattatacacattcccaatactggatacatatttgatcttgttcagcctaagaggagaaaatggcattccttttaattcttcattgtggatgaaagtgaagcactttttatcagtttgttagtcatttacatctttcttctgtgaattactagtacagttgctttgcttgcttttctgtttgcatgttcttcttttttcctcaaaatttgtaacagttttttgttttgtgttgttttttatttctaagaaagctctgtgttcccataatcaagtctgcagagatcctgatgagcaaagcggtcagcctggcctgagagctctgcttcccgctccccatagtcaagcgttttcaagtcaccttgctgatttttttggcatttacctctacattgctaaatagcatgcttatcactgctgtttctagtttttcattttagatgttatattttgatctcctactgtgaaagatgaggatttcttttcagcccccagcctccgtgcttcctgtctttgcgttctctcattgtggttttgtgtacctggagttcacattaagatgctgtgagtgtcattcatagattagccatgtagtagtatacactgctgctgctttttcttttacacaaccttttattcaccctccacttaaaattatttttgtctgtttacttagttttcttttgcttttttttgagacggagtctcactctgtcgccaggctggagtgctatggcacgatctcggttcactgcatcctcctactcctgggttcaagtgattctcctgcctcagcctcccaagtagctgggattacaggcacatgccaccacacccagctaatttttgtatttttagtagacggagtttcaccatgttggccaggatggtctcgaacttctgacgtcaggtaatccacccgcctcggcctcccaaagtgctggaattacaggcgtgagccaccacacccagcctgtttacttagttttctatgtaaatgtcactaattcaaccccaactctttgtgagatatccccacatatcacaggggtcagggatcacagcagtgtcatcttgagatctctctggagcctctgacctcctccatcatggctgccctctgtgcctggtgcacagattccctgttagttctttgcctctctcttttttgatcttctgtgtcctacatcctattctttttctttttttttcctccagtatctccctgagaatgggttcatagaaggtaaaattttatggccttgcatctttgttttaccctaatgcttgatggtttccttgggtataacattttaggtcagcaactatttccctttataattttgtgggaattgttccattgtcttctatttgccagtgttgcagcaagaagaaaataattccagtcctttgtgacttttttctctccaaaagctcataggaggttcaggctgttgccaggattctaaacttccagtgtggtttgccttgctgtatagcttaaggtcttttttttttctttctttctttcttttcttttttctttttttttttttttgtcatgctagtcactcactgcaccctttcaatacagtaattcatgtctttattttctggaattatttcattggtaatttcttctactctgttttctttttctggaactccctttaccctggtcccctaattatcatatttttttctcctgtttttctgtctctttgccttatagttttgttttctgggattaaacttgaggcttccctaagtttaatcttccaaattctattaaatgcttcatttctgctatcttttttttgtttttgcatcacttcagttttcttactttaattgtggcaaaatacgtataacataaaatttaccatctgaaccatttttaagtgtacagttcagtattgttgagtatattcacattgttgtgtaaccaatctccagaactttttcattttgcaaaactgaaactgttacccattaaatactgacctgccattccccttgtcccccagccaccattctactttgtatcactatgaatttgactactctaggtacctcatgtaagtgaaatcatatagtatttgtcctttttgtctggcttatttcgcttagcataatgacctcaaggttcatccacattatagcatgtcagaatttcatttctttttaaggctgaataaaattccatcatatatgtttgctatcatatatttaacttctaggatttttttgttccctcagttttttatagcatcctgttcttgttttctagatgtaatgtcacatacgaatttcgctgaagattgtaggttgattctatcaccaaatctccctacctgggttgtttcctacagttcctttgttccactggtatctttagttctctatctttatgcttgaggtttgactgctcatgtttaggtggaggctctgcaaagctgacccctgcctgggcctgtgtatgcggcctgcaactatggtcttcatagtagagagctgttcctgtggcatgtccatgacaagctcctgatgtcagtgtctttaggtccttcctcttgggctcatccattccccagagaagggccttccagtctcctgcttgagggcttagacttggcagccaggattatgggatcagtcagagaagaggcctgggggtggagaatgactatctcagccctcaccttgtaaattcgtttaattcccttgttttcagtgtatcacttgtgcctcaactgctcaatatccacctggtccagaggcttcattttatactctggtgtgcagggaagagagagtgtctggagctttggctgctctgtgaacacatctctaacccagtcctcctgtttttaaccaccttcatcccccgacctgaagcacctcttgccacaaatttcctgagcctttgggggattttgtaccatagtcaggtctttgcccttccccactgctggcttgggatttagtttgcttaggtctgttatgttagttatttcttgtccatcaacttttcagctgccaagttttattttctttcctgttttctttttcgttgtcagttaatgcttttgggggaaaaaaagaaattcctttctgtggtttcgtggggcttcacaatggaatgagactgtgagtgcatgcgtttcattgctatctgcctggaggcctcagagcgctttattcgtttctcctgaaggatattaatcatatctgtcacagaggttccagatatcctttgtgtgtgtgtgtgtgtgtatacacacacacacacacacacacacacacacattatataaatacacatactcctttgttctggatggccatttatttcagcatcacttatttcatcatctctcttgaactacctgatagtcctaggtatgaatgggaactgagtggtgtctggacttgctgttcccttctgtggctctgtgggtctggtgctctgccacaggttgctgctgagcagagaaatgagagcatgatctgaatgcggcacaacatcctgggtcccagccagggccctgtgagtgtcagccagtgctgtgatatgcattgtcgtcatgatttttatgccctggcatttttcattatttcattatacttgttggtgttccagataaattactacaaataattttatttcttctttccaatatttatacctcttgtacttttttgggtttattgcattcatgacagtctgaaacaactaatacttattaatgctggacattcttgttttattttccattaatagcaatatctttaagatttttgtattgttttctgatgaatagtttatcaattaagggaagcttacatctgttttgaatttactgagtttttttaaatccagaaatagataagaattatagcaaattcctttttggcagttaatgagctattcatatggtttctttttaaacttatttatgtaattaatagcataaatagattttctagtaggaaaaaattcttacatatctgggggcaaaattccaatttggttatggtgtattactgttgtgggaaatctctacttgattatggttaatatttaatatgaagcatattattttttataactcttattgatgaagagacatttggcttgtggttgcttgctttaagtataaataaagttttgtgttaataaggcctgatttttttagttacgatgttagtgagctctaaaatcctgtatcatctttttatatagtcaaaaatgcaataagggccaagtgcagtagctcacacctataatctcagggctttaggaggccaaggtgggagaatcgcttgaggccaggagtttgagaccaatcaggtcaacatagcaagacctcctcttacaaaaatgttttagaaaaatagctgggcatagtggcacatgcctgtagtctcaggtacttgtgaggctgaggtgggaggattgcttgagcccaggagttcaaggttgcaatgagctgtgatcatgccactgcactccagtgtgggcaacagagtgagtccctgactttaaaaaataaaaaaaaaaagtaatatttattttactgccttctctagtagtattggtgacagaattaattctcagccaaaggattttctttttttttttttttgagacggagtcttgctctgtcacccaggctggagcgcagtggcacgatctcccctcactgcaagctccgcctcctgggttcacgccattctcctgcctcagcctcccgagtagcagggactacaggcgcccaccaccacgcccggctaattttttgtatttttagtagagacggggtttcaccatgttagccaggatggtcttgatctcctgaccttgtgatccgcctgcctcggcctcccaaggtgctgggtttacaggcatcagccaccgcacccggccaaagatgttttatactctggttataagactctgactctccagtctgacaaacgaaaacttgaaactttaaaaaaaaaaaaaattgcttggaagttgggaaacttctcatttaaaagttccagacaatttttgtgttctctaacagtgaagactgaagttttccctgggactgatacccttgttttggtgaaagtcttctgaaaggacctgttagttgtgcagaagtaaggctaggcctcctcctgttctcggggctcagggtgtgagtggtctgaggcccgccatcgaccccggtgcctcagtggcagatccagtgtctctcatcccctgtggccgcttgatctgctgaattctgagtcggatgtgttgaagtctcttcctctgaactgtggtttgtgtaaaaagctttgatttctaagagattatgtcgaaccatacataaaggtttctagccctatcttcttggtggtggcttttacctttaattttagttagtccttttaatcttgaagtatacattttgcaataccaatattactgtttccatctatgttttgaggttagaaatcagagttggaggcagggtctgggcccaggtgctcttgccagggctgctttctagggtagaatggaggaagagccttgggcaagggccaagaccactggccactgtcgccaggggagcactcaaaagtcagggctgtgcctgggagcaagagggactccaaagacccagagcagatctggagcactgtgagttggaggagttggggtcggacagcagcctacaagggtgagggcggtgagaaaccagggtgaacagagaaggacagatgtggcccgctcagggatccacaccagcgttttgtggcatctgatgcctagtcaccagcacgcatgggatcttgcctggatttgtgagctgacgcttctgcaacactgagcctagcagcgccagggttcccctggacagaaacagccacatggccaagcagaactacttagcagctatttaaagggataactggaaacccttcatcctaattgggcaagattgcttaccagcttgcgaagtagggcatatgcttaaagtactttttaaacatttttttaaatgatgctgctaaatgaaaacacttctaatttcacagggaggatccgtttttgccaaatgaagttcacttagctccttttattggtgctttgatgaagaggggcgtggtctgtccctttagccttgttgttcttgatctggtttttctttttttatttttatttattttgagacggagtctttctctgtcgcccaggctggagtacagtggcacaatcttggctcactgcaacctctgcctcccgggttcaagtgattctcctgcctcagcctccctagtagctgggactacgggcgtgcaccaccacgcctggctaatttttcatatttttagtagagacggggtttcactgtgttagccaggatggtctcgacctccagacctcgtgatccatctgcctcggcctcccgaagtgctgggattacagatatgagccaccacgcccggcctctttatttattttttattgtaaaatacacataacaagaatttatcattttaactgttttaagtgtacagttcagaggcatgaagcacgttcacatggttgtgcagtcatcactactttctatttccaaaatgttttcatcatcccaaactgagctctgtatgctttaaacactggggagggagcttcctattcccggtcttcaacccctaaccaccattttgctttgtctctgaatttacccattctgggcacctcatagacgtggactcacaccgcatgtgccctttgatgaggggctgatttcactcagcacagcttccttaggcccatctgtgttggggcgtgtgtcagccacgctgcttctgcatccatctgtccaccttcttctctccgtagcccctaccccatcctagttcaggagttgtggttttccttgtgtcttccagaaacacagctgggagaccgcctaccactatggcttgaaaacctgtactgactctgtagccagcggagttagacccataatcctggcctgtgtggaaagactggctttttctaataggagtacttagatgttttatttatcctcccttttctcagaggcatggaacgcagctcccctccctgccctcactaccacctacctgaaatacgggaagattaggtccttcgtgtccttaaggaaaaggggagagtgttttggttgccagcaatgtgggctccaggccatcatcaaggcaactcatcaaggttgtagaattagaggcaagaggataacagaggcagaggataagagcggaggctccagtgggctgtggagggagagcagaggccagcatgccccctggaggtggtggccggtggctgagaggagcatctaggaagaccggaaactcagccaccctgcaggctaagggcccacattgtgcctcttctgacctgccaaattcctgtgaaatgtgggagaaagtgaggggactcacaaggtgggcttttagagactgcactggactccagttaaaggttcttggccgggcacagtggctcatgtctgtaatcccaacgctttggaaagttgagacagaaggattgcttgagcccagaagttcaaggctgcagtgagtcatgatcatgccactgcactactgcctcggtgacagagtgagaccctgtctctaaaacaaaagaaaggttcttaccatgagttagcctcattttctggctttccagcgtcatttgaaggaagtatctatatcaaaactgcccatttacacttttttccatataaatagaaatactagatgtcatgccagctttaggaaggaaaaacaggattttcaaaataaaatattgtcagaacgtgtcctccttctggagactgagggtgatttaagtttctttgtcgtctttcctcccatgggccgtttgtctcaggtttgactcagtaggtcaaatatgccagcagctggtgctgcagcatgacaccacccaacaccaaagccatcatgtcaccattcagaaaaaggaggccttgatatttgctgctgttccctctccgtcccccaggacagcatgtgagcctatttagataattacagtcccaagtgaatctgcactgagcattttttccattcccttactcatgaaatatcgtccatttgggaaagagaagtaatttcaccacaagacacttatgattttagaggctgaattcagcctttctaaggataagaggttaacagggggctgaagtttacttttctagtataaactaaacttaatcttggaacaaaattccttagaactaattctttaattattacatattattttcttagtaagcacatccaaaaatacagaagtgctgtttcctttaaaaaaaatttctcttactaaaaatattctctttggagcgctagaacattataatgtgaacaaaatcatgttttctaaaactgtgtattaacttatgacttaatgtctctccacataggccaggaatatgggtctaactccactggctacagagttgcaaagggttttcaagccatggtggcaggtggtctctcagccagaactgtggttctggaggagaggaggaaacccacaactcctgaattatgatggggattggggtattcagagaagaaggtggatgggtagatgcagaagcatcatggctgacatgcaccacaacatggatgggcctgtgctgagtaaaaagaagcccgtcatcaaagggcacatgccgtatggtagagggacacagtcacacgtgtgttgttgggaggcagagtctaaggtggaagaacctctttgagggcaatttggcagaatccgtcaaaatgaattccacctgtgtgtagagacgtgcttaggaggataattattgcagtagtgtttgtgataacaagactagaaacaccctaaatgcctgctgtctccatccatgtgatgaacctgcatgtgtcatcagagagtgaagtaggcagtggtgacggaattaaagctagcagtgatgaaatatttaccatgtgaacgacattgtctaagtgcatttggtcttgaccacaatcccatgagtcaggcattttatatccagtttacgaatatgaaaccaaagcatcaagaggctccatgactgctcagagtcacactctagtaagggtcagagctgggactgaactcctgctgttgggcccagcatccagtcccttggcctccacactgaaactgttcctccagatgtcatgaaggacctagctctgtatatcttggtaagggagcagaacttgccgtcatctgcataaaagaggggaactatgcatgcatgtttgcataagtgcagggcagcgctgtcctgtagaaccttctgtgatgatgggaatgttctagatctgtgctggctgaaccttagccacaggtggctgctgggcacttaaaaggtggctaatgtgactaagaaattgaattttaattttaaaatttattaaatttttttttcttcaacttttaacttctggggtacacgttcaggatgtgtaggtttgttacataggtaaacatgtgccatggtggtttgctgcacagatcaacaaatcacccatcttaattcttattaagaataagcccagcatccattagctattcttcctggtgctctcactccctccacgcccccatacaggccccagtatgtgttgttcccgcacatgtgtccatgtgttcgcatcattcaactcccacttataagtgagaaaatgcagtgtttggttttctcttcctgtattagtttgctgaggataatggcttccagcttcatccatgtctctgcaaaggatgtgatctcgttcctttttatggctgcatagaattccatggtgtatatgtaccgtattctctttattcagtctatcattgatgggcatttgggctgattctgtgtctttgctcttatgactagtgctgcagtgaacatatgcatgcctgtatctttgtgatagaatgatttatgttcttttgggtatatgcccagaaatgagattgctgggtcaaatggtatttctgcttctaggtctttgaggaattgccacactgtgttccacaatgattgaacaaatttacactccgaccagcagtgtaaaagcattccttttactccacaaacttgccagcatccattgtttcttgactttttaataatcgccattctgactggtgtgagatggtatctcattttggtttttatttgcatttctctaataagtgatgttgagctttttttcatatgtttctccgccacgtgaatgtcttcttttccagaagtgtctgttcatgtactttgcccactttttaaaggggttgttttcttcttgtaaatttgtttaagattttaacatttaaatagccacgtgtggctgctggctgttctttggggcaatgcaaggtcaaacatagacagaaggttgtaaaataaaggatcactggattttgtggtttgcaaaccctacctttaaaaaagcttctgcaggccaggcgtggtgcgtcacgcctgtaaccttagcattttgggaggccgaagtgggcagatcacttgaggtcaggagttcgagaccagcctggccaacatggtgaaaccccgactctactgaaaatacaaaaattagccatgcatggtggcatgtgcctgtagtcccagctactcaggaggctgaggcacgagaattgcttgaacctgggaggcagaggttgcagtgagccgagattgtgccactgcactccagcctggacaacagagcaagactccgtatcaaaaaaaaaaaacaaaaaaaaacctctgcagaaatgtgaagttggaagaacagttttcataactgtttatttcagaaccactaacttaatctagccacttcatctgagagatgagaaaactaaaggcagaaaagttgagtcattttcctgaagtcacactgagttgctttaatgagagaaggaggagctggtcacagtttgggttggtttgttactctttagagcagtggacatttaggttagccaggggcttcattcaatttgatgtcagctcagttcttagcgtggccagttggttcctggaaactgcagctttgggtgaaaccatataccataagccatgggaactcaactgtggctcatatcagttaacctacagtgaaactggtttcgtcacacagcacatcaccatttcacttaacatcacagtgtccaagaacctctcagtgccattaagtgaggacttattagaaagaaagaaccagacttttgtctcccaggctcccagaactccatgaggaatcttgtagtggctcgccctttcctgaagccccagaattcatcctgcctcccgtacaccccaacctcaggctgtcctgcctgcctgtgccacagcatgggtgaaccacgtgcagtagaaccacacttccctgtgggtgtacttgtcagcccctcatgcatggagggctttggaaatgtttgtgtggactctactcccagccttgagggctgaaccactagtgagtcgtgcaggtggctcatgagaaggtgtctccggcgtttccttgggggaccttctggacacaggtaaatgctcagcaaggagcagggtggggcttagggggactgccagtccactgaccgtgggtgactccacgaggagaggagccagcagagctgtgcatagctgtgaccttttttagaagcagcaagcaaggaagaagagtggaatttatgaaaatgaggtagcaaacttaacagaaaggcagaagaaaggagaggaagaaaattccaggaaagtgtttgtccagaggcctggagtgtggtcctggggacagaagatggcagggaatcatgtgggtcctgaactgagagcacagagaagacctgctctcaggatgccacagaagaaccagaggcccctgctgagccactgggtttcgcctgccttcaggcgctgtgcagggccagcactgcctgagctgctggtgggccagaggaagtggacccagccagggggcaggaggtgttggcccgtgcttgcaaggcaaccagaccctgtgtcacgatgccaaagccagggaacctcagggaggaaatgctgcgggtggggcctcctgagtgtctgtcaaatgaaaacagaggaagtaagaaagatagggcccagccactcctgagatgtaaatctcctgtgattctgtctccagggagaggctgtgcagcatctgcctgaacatctctgggacgcagccgtcctcttgccatgggaaggctcttgcccacagaggagtaaagggaagggcactgcttcctggaccagctcaccgtggtcactgtctcctctttcccagtctcaaaccccaagtgccgtcagtgcagatagtgagaggaaccatttaaaaagcaaattattccaaattaatctccagttgaaatcccaacagactttctttattcttgaacttaacaaaataattaaaaattcacctggaagaataaacaagaagaaagtttaaagaaagagtgctgatgaaggcaggttgccctgcctgattggaaaggtgctatgaaggcccccttcacacgtcattctgcccaccctagcattgcggaagggaagacacagtggaaacagctatgagcatggcgcctgcagctcgtgtttcagagtagtaatgacattgaactgagtgggtttaggaggtctgcatttttttaaattttaaaagataggctgggtgtggtcgctcacgcctgtaatcccagtactttgggaggttgaggcagacggatcatgaggtcaggagattgagaccatcctggctaacacggtgaaaccacgtctctactaaaaaaaaataaaaaaaattagccaggtttggtggcgggcgcctgtggtcccagctactcgggaggctgaggcaggagaatggcatgaacccgggaggcggagcttgcaatgagccgaaatcgtgccactgcactccagcctgggcgacagagagccaagactccatcaaaaaaaaaaaaaaaaaaaaaaaaaaaaaaaaaaaaaagataagcagaagttgccaaacttgatttgggagataatgagccatataaaataaggtgactaaaacaataatatgaacagaatcagaattggaaaagaattccaaggaaccccagagttatttgcttgggggacaataggttgctttcaaccaccatagacatgtgattcactcctttgcagcagatacgaaagaaatcagatcaggtgttctggttgctattgctgtagagcagaccaccctgaaacacagtggattagaattaacaacagtgttcattttgtttgggcatgactgccatctgctccttggtcaccagccctcatggctgcggctgggactgtggggtcgccatctctctccatgcagcctatatacttggccagtgtgaatttccacacaccccaggagcctcaggggtacaagagagcattccaagaatcctgggtaggcagttcaagcttcttaggaactggccttctgagtcccaagtcacttactcctcattcaagcaaattgttaaggccagcccagattcaaggggaaaagaattggactccgtctcttaagtggaggatttcccagaatctgtaacatctttaacctatcacataaggtaaaaacattaaggtctgcctttctagcaaggatttaattgcatcttgcttctgtcatttacagccaagtcttcttcaaaatttttggaataaaaaggagaaggcgttccctcacaatctgtttgacacagaatcatataattactagaactcttatttattcatgactttggaatccacattggcctgttttatctgtatgtgatgccatatatatatatatatatatatatatatatatatatttttttttttttttttttttttttttttcgagacagagtctcactttgttgcccaggctggagtgcagtggcgctatctcggctcactgcaacctccacctcccaggttcaagcgattctcctgcctcagcctctccagtagttgggattataggtgcccaccaccacgcctagttgatttttgtattcttaatagagacaagctttcaccatgttggccaggctaggctggtcgtgaactcctgacctcaggtgatccacctgcctcggcctcccaaagtgctgggattacaggcattaaccactacacccagcccaccactaatatttttaatcatgtgtattatttttacaaatgtgtaatttgtaaaagtaatagctggtcattgtgaaaaaatttaaacactcacacattaagatgaagaatcaagttaaatttcagctcacttaatttggttcctatttctggcatatcgaaatctttttggatactaaatctattaatttgctattttctgtccttcccagacttctttgaccacattagaaaatgtagaaatgcgcaggtccaaccttttaggttgacatgtatcaaataattagtgaaaaacataagtacctagaaggtgctgcatatagcacacccatcaaaaatcagaacatcagttttgccatgagctttacaggaatgtctgaagattagcaaatggagtaatagattgttttttataaaattttttttagatgtttactcagcctaggccggacgtagtggctcatgcctgtaatcccagcactttagaaagaagaccaaggcgggtagatcacctgagctcagacgttcgagaccatcctggccaacatggcaaaatcccgtctttactaaaaatacaaaaattagccgggtgtggtagcgtgcgcctgtaatcccagctactctggaggctgaggcaagagaatcacttgaacctgggaggtagaggatgcagtgagccaagatcatgccactgcactccagcctgggcaacagagcaagactctgtctcaataaataaataaataaataaaaattttcttagcctaattgataattcagatattttcagttccccattttgaacagtaatgctgcagtaaatgtccttgtgggtgtgtcgtgtccatttcctctacactggacgcctagatgtgatattactgggtcaaatcgtattttcattttctaaaaaatacttccaattgccttcttaaaagcctgtaccattttatgttcccatcaaccgatataagactacccatttccccatatcttcattaatcctatggataaagagtctttttaatttttgccagtttagtgagtgaacatgatactttaccgttttcattttcaatgagactgaacatcttttcgtacatttcagactatttgtgtttcctcttcagtatgttactggttcatttccctgccaatttttacttgagttatctatctcttagtgattataggaatatattctggatattagtcatttgctatgtatatactggttttaattttgttatacagaaacttaattttttgtagtcagatttctcattcctttcttttatttatttatttatttatttatttatttatttattttttgtattttgtgccttatatggctttctttccccaggattataatcttagttcttctttattttctttttataatgttgtaattttggtttttaagcttagccatctggaactcatctctaggaaacaagcagcatgggactaatccctgagagaagggaaactcctgcagtgatggccagctcaccagttctctgtctgggaacaatatccgcctcccagtgcacggagctggcctctgagcagagcacagcagccccactggctaagaaggtggtgatgagagagggtagccgaagcagcccattttatggaatggggcatcagaaaggaggatgctatgaagagaggggacccaggagcctatgtgcaggtctccacaagcccatgcccaagggctgtgctctccatgtgcagcacgaggccactcaaggtttaccagatagcctgagattggaacagaggtactaaaattggatatctgtggctggatgcagtggctcacgcctgtaatcccagcactttgggaggccaaggcaggcagatcccctgaggtcaggagttcaagaccagcctggccaacatggtgaaaccccatctctactaaaaattaaaaattagccgggcgtggtggcgggtgcctgtagtcccagctactcaggaggctgaggcaggagaatcgcttgaacctgggaggtagaggtttcagtgagctgagattgcaccacctgcactccagcctgggtgacagagtgagactctgtctcaaaatagataaataaataataaataaataaaattggatatgtgtatatgcctgtcccaggcaaggactgaacactgagtgcacagcagggaaggagcacaggctgcatttgctgagatttcacatgaacccacttatgtgtgcgtttgctttgtattctctctcaccagacctttaatgtaagtgtagtcctccctgggctcttattgcacatgctgagcttcagggaggaatgagctgcttttatcctctgtgatctgtaaactgttacattttcccaaaaactcaaactgattccacagctgtaataataaagacctattgggaaaacctcagagagatcctgggaatgaggctgtttagatcgccatcagcctgagacagctggttcctgcaagaatgaatgtacagcactttctctctttttttttttcaagatggagtctcgctttgtcacccagggtggagtgcagtggcgtgatctcggctcactgcaacctccacttcttgggttcaagtgactgtcctgcctcagcctcctgagtagctgggattacaggcgtgcgccacaatgcccagcttttttttttttttttttttgagatggaatctccctctgtcgcctaggctggagttcagtggtatgatcttggctcactgcaacctccacctgctaggttcaagcaattcttctgcctcagccttccccagtagctgggactacaggcatgcaccaccatgcccagctaatttttttttttttttttgtacttttagtagagacgaggtttccccatgttggccaggctggtcttgaactcttgacctcaggtgatccgtccacccctgcttcccaaagtgctggtattacaggcgtgagccactgcgcctggccaaatattttttttgagacagagtttgagatagagtttcactcttgtcgcccaggctggagtgcagtggcgtgatctaggctcactgcaacctctgcctcccagggtcaagcgattctcctgcctcagccttctgagtagctggattacagacaggcaccaccacgcctgactaatttttgtatttttaatagagacagggtttttgccctgttgaccaggctggtctcagattccagacctcaggtgatccacccgccttggccttccaaagtgctgggattacaggtgttagccaccgtgctcggccgaattttttcatcatgttggccaggctggtcttgaacgtctgacctcaagtgatccgactgactcggtcccccaaactgctgggattataggcatgagccatgacgcctggcccatacagcattttctaattagtgtcctgcctctttcccaagaagctttgcttttttctttttttctttctttcttttttttttttttgactttagcagttagtgtacacagagtcaattcattaatagacacctcatggaggcacctagaggacctcggcaaaggtgaagaagtactgggaatgcagccatgaatccaactgtgtcctcagtggaatttagcacagtacacaattcagtgtgtaccctgcagcttctccccgacagtgattgatgtctttatgaaatgttagtaaccaaggcaaggcaagtaaccaggcaatcaaggcaagcgaaagcatcttctagaagcaaatgtcgtgggctgtgcggttttgctttaccccgtcctgctgcattattcatgagtactgtctctacattcccccgtctggaactttaatacaacctcaacactctgggaagatattcttgtatatgcactaaaattaggattttaccttcccatgtgcaattcaatatcttcatttttctcaaatgacttttgctgcattgagggaaataaaattctgtgtattacacaatatttgtttaagctctcctagagacctaaccggttttggagatgcttggaatgttaaccttttttatatctgagacttccttctatcaaaaagtcccatatcctactgagaaatatctctaaggtatttatatcctagggaaagttagagataatttgcaatgagtaactaccatttccctggggaaaaataatgttaagtttctttctgtttttgctttttcctcccaataaatcttgtacataaattctaaatgttatcattcagagtggacaccacactccagacccttaagataatcagcccttccttccttccttccttccctccctccctccctccctcctccctttcttcctccctgctgtagctactgataagttcctttcactgctttccagagaaagccctgctggaatctcaccttcgtgtttcaagaccttggccagcatttttcaaagcctattccaaagaaccagcaagcaccaacaaaacattccctgctggagcactgtatattacatgacatttgtagacagcacagtgtctattaacacattaaagacttcaagaagtcctacattaagaaatctgtgtgactgtttaacccaacatagcgcagatccacataacctctttacttaggtttgtttattttactacaatcaccataacaagtgttggcagattttccctgttaagggccacgtaataggatcaggggtcagttggtctcagtcacaactattcaactctaccattgggctaaagaggccttcaacactttgtaaatgaatgggcatggctgtgtcccaacaaaagtttattatatgaaaacaggctataagccagatttggcccatgggcagcagtttgtcaacccctgacctagaacatcctacaatatgtcccacagaacatactttggaaaatgctgtgctgggccctacactcggtcactcaagaatttcttgccaaggactgggcaccataataagacagcagtcaacaagagacatgttctctgaactcatgaactctgaactgtcatgccctcctgaactacacagacaagcaagcggtagactttataacaagtaaagttattaatgaacaaggataagtcgtcaaagagcccagagagaaactcagtgctgtgagagtcagtgacagggatcacatttagatgaggggagacagtggcagtgatgtcaaaatcggtgtcagaaggtggaggaggcagcagtgcagagccagggcgaaggagtagctgcagccaggaaacaccttggtgtggtcaaggacatggaagaaagctggttggctggatgcagttagtggggccagggaggctgtgctgatccagggagtccaagggggcagggcctgcagagcttccatggctcaggtttggcctcacccagtaaccacgagagtggtagcaacgcagatggaaagacatagaaagattagaaatatgtcttagacagaatcagctggacttagtgacagattggttgtaggggaggaggagaggaagaagtcaaacacaacaccatggtgtctggttggacagggccattttctgagatggggagggcatagatatgtttaaaagctctgttttgattactccacatcaggatttaaataaagtccaaagaatggtcatggtaatgacaataactgagcaaagtaatttaattttttaaggtgttacagttctctagagaagcagaatcagtaggatactggggatagtggggaggggagagagatttattctaagcagttagctcaagagtatagaagctagcgactccaaaatcttcagggtaagccagcaggctagaatcaggaaagagttgatgctttgagtgtgaaggccgtctgctgacaaaattcctcttcttgggcgaggtcagtatttttctatgaaggccttcaactgattagatgaggaccatccacatgattagatggtcctcatctaagtagacttaataagtctactaatttaaatgttaacatttaaatgttaagctcattttaaaaaacaccttcacggaaacatctaaaataatgtttggccaaatatctgggtaccatgcctatcgaatttgacacatacaattaaccatcacagaatgtattaaaatctttaaattacttttctgtggggtgctttgttggtgaagcaggctggacaggattattaaacattctgggggaaaggttgtatttatttaaatcatgtggagtctgaggtgctgtgaaatatgcaggtgatgatggcaggcaggcggttgcacagcaaatccggagccgggatcggagagcagagcttgaaacacaaatctgggggtcgtccatgatccatgccatctaatggaggttcctgagatgatggaaatgttctgtatctgcgctgccttcatggcagccaccaaccacatggggtcttgagtccctgaaatacggctagtgtgtctgaagactgaatttttaattccaattttaattttaattaaaatagccacatcgtgtggctgctgtgttggagagggcgggcacagtgatggtatttaaagctgtcagagtggaggagagcattcgggcccttggtcttagggaagcaaagagagggaggactgaggaacacacctggggaccccagtgtttgcccacacaggaacaagagacaaggccctgcactcccataaacacagtgttagtaccaagacccctgtgtaaaccaaggctcacaacatgctgctctttttagtaaaagcagaaatgtttgcaactccacctgccagtccagggaggttataaggaagctggtctccacctggtattttttgggtatgggcagagagaaaaagagagaaagtctcttatgaggaaagaaaaccaggccagaagaggtttggagtccagatttataatatctatgctgcatagagaccttagattatgttctcagatacaggaagcccctgggcttatagtacacaatagctgctttaaaaatgacaaaacacttgagaaattatctactcgagctagtcagcaaatacagcaaatgaaaggattatctaccagaacttgagatgataaataataagagactacaaaaaaactgtgtttaaacatattaaagagataaagggagcaatagaaaccacaaggaaggaatgattctatttaaaaaagaaatttggaaagagaatcaaataacacttctagaaatgaaaatgtggaattaaaaccacaatgagatgtgtcgccaaactgatcagatgcaggagaagagagaactaatgaattgggaaataaatatagggaaattacccagaatataaaagagatgttaaaaaaatagaaaatataatagaggggttgagttagtatgtgttcaccttcaagaaaccagcagttgcttaaaccattagtagtttcaggattggttcaccactcagtgttttaatcagggccccagagtgtctcctctccatgctcaccatctttaatctgttggcttttgtccccatacttgttcctgtgtggctggttccttttagctgccaaactttagacatcacttccacctgcagggcaggaagaagaagaagagataggacaagtccctcctattttttccctttaaagaataaaagtaaaaggctccccaggttcctctggctcattggcagtactctgttacatggtcccaggccgcaagggcatttgaggaagggagcatgtaacatttttcagcttctttagtgggaaacctgcaagggagagagagcttgggaatgactgttggtctatctaatactgtctgtctcagagcttaagagacatagacaaaaatcagacgatggccgtgccccatgcccagagggaattccagatgaaaaggatagaaacaatggagtggaaacaatatttgaagataagacacctgaaatttttccagaatgatgaaagacaagagttcacagattgttcatttatctcaagcaggatggatacaagaaaatactcatctagacccattataatgaaactgcagaaaaagcaaagacaagataggtaatctattaaaaatttctagccaggcgtggtggctcacacctgtaatcccagtactaagggaggctgaggcaggaggatcacttgagccccagagttggagtccagtctgggcaacatagcaagacgttgtctctacaaaacatttaaaaattatccaagtgtgatgttgcatgtctgtgatcccagctaactgggactctgaggtgggaggattggttgagcccaggaggttgaggctgcagtgagccaagatcaccccactgcactccagcctgggtgacagagtgagactctgtctcaaaaacaaaacaaaacccccccacaactttctgctaaccagtaataataagacaacctagcaggaaattatcaaaggctacaatagacaagtcacagaagaggatcacaagtgtccaatagacattttaaaagacgttcaatctcattagtgatcaggaaaatctaagcagaaataacagtgagatataatttgataaccctgagaggatgtggggaatctaagaaatgagaaagtgaaagtacttctctttcactatttcactatttcgctattgtagaaagttcaacaccatgaacagtgctatgccagtatatttctgaaacaatagacagttttctagaaaaatatatatttcttcaaatattgaatgtaaatatttctccaaaacttactcaaaaagaagtaaaactttaaccattaaaggggttgaattcatactttaaaacatagtcacacaagcaaaaaatgtcccaacaaatctttaagaaacatatcctattgtgtatttacaagtccagggaatttaaaaaggagtgaggaaacttacacatctgaccagggtggagtagcagggatctcctttcagaaacaacaaaactaaccagtaccaacagagagatcagtaaggataaagatacaatgagaccttgttggaagattatattctatgcagaagacatttttctttggagtgttgtaatatttgctttttattttttatttttatttatttatttattttaagatggcgttttgcttttctgcccagactggagtgcaatggcgcgatctcggctcactgtaacctctgctttccggtttcaagcgattctcctgcatcagcctcccgagtagctgggttttacactttcttaatctcccactttttttttttttttttttgagacagagtctcaaaatcccgagtagctgggatttcaggcacccactaccacacatggctaatttttgtatttttagtggagatggggtttcaccatgttggccaggctggtctcgaactcctgacttcgtgatccacccgcctcagcctcccaaagttctgggattacaggcgtgagccactgcgcccggccttgctttttaaatttattgtctttgtcttaagttttgtctaaagcactacagaagttagctgggaagagaatgagatcatgttcttaattgtcagagtcaaggattttatttggatggatggtctgtgaggagctgctgacacacatgataagtaatcttaaagtcacttaggagtgtttgtgaacattttaaccagcttattccaacaacgaaatagaaatttcctacattcttaaacatttgtttttcaataccgtgatgtggattgaaaaataatataggccgggcacagtagctcacgcccataatcccagcattttgggaggctgaggtgggcagatcacttgagtccaggagtcctagaccagcctggccaacatggtgaaactgtgtctctactaaaaatacaaaaattagctgagcatggtggcgcacacctgtaatcccagctacttgggaggctgaggcaggagaatcacttgaacctgggaggcggaggttgcagtgtgccaagatagcaccactgcactccagcctgggtgacagagcgagactctgtctcaaaaaaaaaaagaaaaataatatattgaattatacatgacacttttaaactacacccagtcagaactgacagcagtagtaatccataaatcttccatcaagttctgtagttagattatgcagggaaaattttcttatatgtatatattcaagtaaatagcagtttctgggtgtaacatattagcaagcatgagaactttaattaatttatttttataatttcaacttttacttgagattccgggagtacatgtgcaggtttgttacatgggtatatggcatgctgctgaggtttggggtatgattgatcttcttacccaggtagtgagtatagcacccagttgtttttcagcccttgcctctcttcttccattccctctcttgtagtccccagtgtctattgtcccatctttatgcccatgactacccagtgtttagcgtcctcttgtaagtgaaaacatgcaatatttggttttctgtttctatgtgggttagcttaggattatggcctccagctgcatccatgttgctgcaaaggacatcagttcattcttttttatggctgtgtagtattccatggtgtttatatgtaccacattttctttttttcttttttttttttgagacagagtctctctctgtcggcaggctggggtgcagtggcgtgattctagctcactgcaacctctgactccctggttcaagtgattcttctgcctcagcctcctgagtagctgggattacaggcacgtgccaccatgcccagctaatttttatatttttagttgagacaggctttcaccatgttggccagggtggtctcgatctcttgacctcgtgatccgcttgcctcggcctcccaaagtgctgggactacaggcatgagccactgcacccagccaaacacattttctttatccggtccaccactgatggacacctaagttgattccatgtctttgctattgtgagtagtgatgcagtgaacatacatgtgcatttgtctttttggtagaatgatttattttctgttggatatatacccagtaatgggattactgggttgaatggtagttttgttttaagttttttgagaaatctccgaatcgctttccacagtggctgtactaatttacattcccaccaacagggtataagcattcccttttctcctcaacctcaccagcatctgttatattttgactttttatttttattttttattttttatttttttgacatagggtcttgccctgtcgcccaggctgaagcacagtgatatgatgataggtcatgcagctttgaactcccaggctaaagtgatcctcccacctcagcctcccaagtagctaggactacatgcatgtgccaccatgcccagctaattaaaaaaattttttttgtagtgatgcattctcaacatgttgcctaggctggtcttgaactcctgggatcaagcaatcctcccacctcagccccttaaagtactgagattacaggtgtgagccaccgtgcccagcctgactttttatcagtagccattctgactggtgtgagaggatgcaatctttaaaagtgaagttctgcagcgtttcccagatcttagaaagtgttcctcctcggccaccatgtaaggaaagcgtcttagccagcccaattgcaagtgtgagcaattccccacagaaagaatttggtgagggagaatatgtgacatcgctgttgtaaaaacagtcagaacgtgtgtccccaggactgccatgtctgtaccgggccgtttagtccatgaaggttgttgctcactgagtgccagcatgcccaccgggacagcagctgcacacacagactgggtgctgcaggctccctctagggaggtcaccacaaagcgattcctgaggcgtgaccacacctactctgcagtctgaacttgatgagctatactgaaatagctaatttgaggctgggcacagtggctcacacctgtaatcccagcactttgagaggctgaggtgggcagatcaccttaggtcaggagtttgagaccagcctgaccaacatggagaagccctgtctctactaaaaatacaaaattagccgggtgtggtggtgcatgcctgtaatcccagctactcaggaggctgaggcaggagaatccttgaacccaggaggtggaggttgtggtgagccaagatcacaccattgcactccagcctgggcaacaagagcgaaactccatctcaaaagagaaaaaaaaaaaaagctaatttgagctgattacatgaaaagcactttttttcatatttactatgtctacttactatttacccattctaggcattttccatgcatggatttattgaaccctcatggaggttctgcaaaatgaatacactgtacagggggaaactgaggcacacagctcctaggcaagaggcaagtccaggcaggcagctccagagcccatgccctcaaccatggtgacagttgtgtccaccctctggctcctaaaacacaatttattcatggtataatcgagcacatgccctattatattgtaatttatctgatcatatggcaaatctccccccaccacctccgcaagaccacgagctcccaagagcaagaagttttatcttgttttttattgtggtaaaatacacataagagtcactgtcttaatttttagtttacagttcagtggtattgagtccattcatgttgtgggtgcagctgtcacaccttcctctccagcactcttcatcttctcaaaccggcactctgcgcccattaaacattaactccccattctccctcccctcagcccctggcaaccaccattccactttctgtctctgtgaatctgactactctagtacctcatttgagtggattcatatgggatttgtctttttgtgagtgggttatttcactcagcataatgttttcaaagttcatccaggtttagcattagcatgtaccaggattcccttcctttttttttttttgagacagtctcgctctgtcattccaggctggagtgcagtggcacgatcttggctcactgcaacctccaccttccaggttcaagcgattctcctgcctcagcctcctgggattacaggcctgcgccatcatgcctggctaatttttgtatttttacaaatatttctccatgttggccaggctggccccaaactcctgacctcaggtaatccacctgcctcaggctcccaaagtgctgggattacaggcatgagccactgcgctgggtcgcttcctttttaaggctgaataatatcccaaatatcccattgtacggataaaccacattttgctcatccatttatcatcagccaatattttccaaaccaagttcattttcatcctggctggagcctttttctcttccatctgatttgttctgtcttcagcatcccacgaattggatacttactccatgctaatccatcccatggctgtccacaccaaaccacatgggaggatgatttccctgtatcagagctgacataccattacaaaggctactcggcttctggatctacacttcctcagtagccttgaagttcagaatcagcttcagatgcacagtagaagcattctccttgtcagatgaacagtgcagaagattctggagggctcactggcaacctgtcatggcaggttgtgatgggaaggggcccatgggggcttctgggatgcagatagtgtgctactttgtgatctgggaggtgattatatatatttgctttataataactcattaaattatgaatttatattttatatatttttcaaatgtatcttgtgtttcacaatgagtagttattaaaagattggaagtaattataaacatctagatggattctgcagtttgcttcataactgtctttaaatttttgctccacttgaaaatttttaaaaagtaaattagggctttctggactgtctattttgggtctggcttttgcaagaaacatggcatcaagccctcaaccttggaccatgctcaaataaaaggcctaggttcaaatcattggatgggcaaatgagtatgtatagttgtatatttcaggttaaaatgaaaaatataagattgaaatggaaaatatatattattttctgtggttacccactttaggctgtatttttgtctagatacagtgggaactctgctaaattcaccttttatgtaaattggaaattttacttagaaaggcctactttagcactatgtagggggaagaaagcaccttctaggctgaatgctacccagagaccctccccccaagcacctatgcttcaaaattgcctccagcacccactgtcaagcctcccagcccatccccaccctagcatctcacttgctatctccctgtgggttttcagtttcttgtttggaaaattattgggtgaattaatatcttttggaagaatttgtgtccacattacaaaagttattccataaatgatttgattttttggtggtggttttagttgtgaaaagtaagagttcaaaagtaagagagttcctgttgcccccacccccacatcagcatttggtattatcattttttagattttagccactctaatatgtgtagcatagtatctcgtggctttcattggtatttccctacttcaaattacgtagaacctcttttcataggtttatttcccagcccatcttctttggtcaagtcactattcagaacttttattcattttttgatctgattattttcctgttgaattttaagaattttttttgtgtattctggatacaagtcatttatcttatatataatttttagatattttcttctagtctgtggctggtcttttcattctctcagcagaatctctcttagcacaaagttttaacttttaaaaaattatttattatttaagttaaaaatagagacagggtcttgctatgtggcctagactggtctcgaactcttggggtcaagtgattctcccacctcggtctcccaaagtgtgggtattacaggcatgagccactgcacccagccaatttttttctttcttgatgatattttactgttgtctgtaaaaactcatcaccaaaaccaagatcacacagattttcacctgtactttttcctagaacttttgtacttctgcttttttttttttttttttttgagacggagtctctccctgttgcccaggctggagtgcagtggtgcagctcactgcaagctccacctcccgggttcatgccattctcctgcctcagcctcccgggtaactgggactacaggcacccgccaccacgccagctaatttttgtatttttagtagagatggggtttcaccttgttagccaggatcttctgacgtcatgatctgcccacctcggcctcccaaagtgctgggattacaggcgtgagccaccgcgcccggcctgtacttttgctttttacattgaggtctgtcatccattttgaattaatttatttttgtgtaaacaataaagtatcggttttgggttttttttgttgttgcatatgggcatccagttatttcaacaccatttgttagagcgtcctttagctattgactttctgtacacctttgtcaaaaattagttgactatatttgtgtggttttatttctgagctctcttttgttctattgatttataatctgttccttaccaatactacactgtcttgattaatatagcattattaaaaatcttgaaatctagtcttctttgttcttttcagaatgttttagctattctagtacctttgcctttttaattttagactctgtcattatctaccaaaaaaaaaggtttgctagaattttgattaggattgcattgtatctgtaaatcaaactgggaagaactgacacctgaacagtgttcagtcttccagtccaggaacacagaatatatcttcttatatttagatatttgatttcttttatctgtgtcttgtagttttctgcatatagatcctgcacatattttgttagatttagaccttagttgttttgttgttgttgggggggggttgcgattgtaaatggctttcttttttcttatcacaaaatccaattgttcatttctggcatataggataacagttgacttgttgttgttgtttgttttgttcttttgaaacggagtctcgctctgtcaccagactggagtgcagtggcgcaatcctgactcactgcaacctccacctcccgggttcaagtgattctcctgcctcagcctccaagtagctaggactataggtgcacgccaccaaacccagcttttttttttgtatttttagtagagacgggttttcaccatgttagctaggatagtctcgatctcctgacctcatgatctgcccacctcagcctcctaaatgagctactgcacccagctggtttcttttttaagagggagtcttgatctgttgcccaggttggagtgcagttgtgcgatctcagctcaccacaacctccacctcctgggttcaagcaattctcctgcctcagcctcctgagtagctgagactatagggacgtgcccccatgcccagctaatttttgtatttttagtagagacgaggtttcactatgttggccaggctggtcgcgaactcctgacctcgtgatctgcccacctcagcctcccaaagtgctaggattacaggcgtgagccactgtgcccggccacaattgaattttgtataccgactttgtattctaagactttgctaaacctgcatgtaaaccctttggggttttctacatagacaatcatgtcatcttcaaacaaaggcagttttatttctacctttccaattcgtatgccatttatttctttttcatgcctttttgcactagctagaacttccagtacaatgttaaataggacagatgagaaaagccatcctggccttgttcctgattttatgagggaagtgttcaagtctttcattattaagtatgatgttagttgttgttttctgcacatatcctttattaggcaaaagaagttctgttcctagtttgctgagagttagcacaaataactgtcgtagttgttgaattttatgtaatgctttttcttcatctgttgatataatcatatggtttttctcatttaattgattaatatgatgaattacattgatttacaaatgttgaaccacccttgcattcctgagatgaaccccacttgatcatgatatattatacttttatagattaatggattcaatttgctatatttgttaagggtttttgtgtctgtattcatgtgagaaattggcctatagttttcttgtaatgtctctgtctagttttggtattagggtaatgctggcatcatagaatgagttgggaagtattccatcctcttccattttttgaagagattttgtagaattggtataatttcttccttaagtattagatagaattcacaagtgcagtcatataggtctggtggttttttggaaggttttaattactatttcaaacaaatgtcatgcattataagattattcctaatacagcatactctcttctgacatgtgcaaaatatttcttcacaaattctcaaatgtgatgttaacaatgtatcaaatatttttagttcaactattatgaagttcaagcatgtaagatagtctgtgtataactgtgaatattgattggacttctgagtcctctctgagtttaaagacaccctttcccatcatacagaggaaagcttgccatctctcttgggtttgtaggcatcccttctttgcccagagctcatctatcccccaaatagcatgcccagttcttcatcacttgctttctgtaagtcatgttatcaaaccttcatggtaaggattttagcttgccaggcttcagtctgtgtgtagtcatggctagagcagtgtgggtagaaggagactttctatccttgtatactgtgaaagtgtttttttttttaattgttctaggtgtacctgcgtggaatgtttcactcctttcccacacctttctcatgactaatgatatgctgataattttttagcatcaccaggaagcagaatagatgaagtctgttcagatgttgaatcaggggaccattgtgctaagttcagccttacttttccatggtatctctgcttctggctttacgtcaggatcctttcctactattctcttgtaaccacagaggaatccaaattcaatcccaaagttcattattaaatatgtccagtgacacaaatttcagaaaagcttggatgagtgcctgacaggatgcccttgcccctccctttctgggctggaccttatgcgtgctcaatacaagcttacttgcaaaatgaacaaaaataaatcaatcagtaaaaaccagcaaattagcaaaaaatcaccaaactgacaacaacaacaacaaaaaacacattaaatggtaacacttaatgctggtaaaataaatggttgcattcgaaattggttcaagactttcatgataatcccactcttagtaatttatcttgagggactagttcgacagaagaaaatactgcacaaagatgctgatcgcaaagtctgtggtggtgacgaggtgagcgtacgctgcacactatgtcccttgtggacagcagttttcctggtcagtgcacatccactagaatggcagcccgcacaatggcacagcagcacggggacccgggtgtgaaatgctcagcccacataatagcacatgcactgtgctgggagcctggggaattagaaatgtggatcaaaatgtaatttaaaaacttggaaatcatcttaatcgttaaattatgggtgactttttttttcttgtttttgagacttgctctgtccacccagagcacccaggctagtgtgcagtaacagaatcatggctcactgcagcctcaacctcccgggctcaaccagtcctcccacctgagcctcacaagtagctggaactacaggtgtgtgccaccatgcctgagttttctttttaaaactttttaaaatgctgtcatacggttaaaagatgaaagtggcaggagggcaggtcttccgtttttggaaaggggtagtatctcctgagtaagtgggagaaaaagtcttttcttttaactcatcacattcagctccacctgtgctggtcttcacattccatctgtgtaggtggagggtttccaggcagcgtaagacctaacctggattgaagtccctgaggggaagggtctgtaatgtcctgccttgtgctctgtcccccatgcacttcccctgcaggagctcacagcaaggtcctgaacacagaccggcctgactggtagagcatgatgcagtatgtggcccaaatctacaagtactttcggacgtaacccatgagggcctgcagcagccaccactgccacccactgcaatttgtcctggaagcacctgattactgcccactgaccctgctctgcccatcacccagctagatggacttcaaaggcaggctcaatcctagtggaccaacacccaaataagaaacagagtgtacctgtttcaaatgcaaacacagctagagtgtaaattggggacgctttgctcttccgtgggacacttctaaagagggcagcctcccttcttccagaccaagaccccacccacaggcttgttttgctaattacattgggtgaatgaacacatcatctgcacagagcttcaaacaaacagcctctccaaattagtctctttttttgctaaaaaataccctggcttttgcctttataaaaactttgcccttggctgagtgtggtagcgctcacacctatagtctcagcactttaggaagccaaggcaggactgcttgtatccgggagttggaggcacggtcaagtatgatcaagccactgcactccagcctgggtgacagcaacagagcgagactacgtctctaaaaaaaacagcaacaacaacaacaacaacaaaactttgctcttgggaagcttgtgctttctcttatccaaaaaacacacaaaaaaacacacacagaaacaaacatttgcttcagggcaatctggaaacacatgggccctgcctttcaggaaatatgagaattctaggtaacaatgttaacacctagaacttgataacatttttagctctcatagtcctttatttgattcattgtagcgaaaggaaagcctgtgataatgcaagggaggccctggctgctttgctggagtccctgggaggtgccccacacctctgccaccatagtctgtgtgctctggagcggccggcctctttcatgctaaggaactcacggtcctcgtctttgacctccggttctttaacactcccattcacacccacacaggcttgtcctccacagaacttgacaggaggtcatgtttgtgggaatggcctgtgtctgctttgcagggttcagcaggctgagggtgtgtgcctctggggaccctgggctgacagcaaatcccaacagtatttcggctctggactgacttggccttcagtgctttcccaggcctcttacatcagcatgggaaaaagaagcccttagggatgggcagtgaagtcctgttgttaattaacaaaaaggaatgcagctgcccctggcaccctactggttaccctgagtggcagcagagccctccccagagccgccccagtccctcagaagtgctggatctggcccgggtgcccatctggtggctctgccgtgttcttctgggcagatctgtgtgcactacacagcaagtgagggcatggctcacacaggtggttgagggaaatgggtaatgcccatcccttgctgttctaagtgtaaaacagcctgttagcgctcctctgacaaaggatcattcttccagtgagtcactgagaatgacagtgactgccattactactcaaagtacatctctgattgctgatctgagccacttcagagccaggttctagagcaagcttgtccaacccatgacttgcaggccacatgcagcccagggtggctttgaatgcggcccaacacaaatacgtaaacttttttttttttttagactgagttttgctgtttcacccaggctggagtgcagtggcgtgatctcagctccctgcaacctccatctcctcggttcaagtgagtctcctgcctcagcctcctaagtagctagaattacaggcgtgtgccaccactcctggataattttttgtatttttagtagaaacggggtttcaccatgttagccaggctcgtctcaaactcctgaccttaggtgattcacccgcctcggcctcccaaagtgctgggattacaggcatgagccaccgtgcccggcctacaaatatgtaatctttttgtgagatttttttgcgatttcctttagcacatcagctatcattagtgttagtgtattttatgtgtggcccaagacagttcttccagtgtggcccagggaagccaaaagattggacaccccaggggctgcaggttcagccccttcccatacctggaaagggcaggagctcggtcccctcctccaagccagacctttgcagaggtggcatctgggctctgcaggtcagtggatccctgagtctcaagccaccactaacctggggacaagagactctgccctggctctgctagtggatcccagctgcagctctgtatcagaatcttcagggcaccgttttgaaaactggttaccccagttggttgactcagaatgtctggaatgggaccagagatgcagtctacatgttttgaaagttctctagacgactccaatgcacagctgcatggagaaccactaagtggggcagggatctccctggtggccccagggcaggcagcctgtgggagctcctgagcaactgcttggcgatggtcattatatcacccgcgcctttgtttttaagtgaaacttgaggcaccgtcagaaccaattcaacccgagagttattacttgtgctgcttcacgcaactgtcttttgttgacataatcgatgcatttttctttctccttgtgcttctactttgcctgctattaaagtgggggaaagtaatatcccaagtggttgagttgttggttgttgggtttaagctgaaattactccaggggtttatgtggggaggcagttgtggtcttgggatacccggagtcagtgtttactgtgattggctctgagtgattacatgtaaatgatctagaaccagctctgctcaaagcagtttctatgctggatggtgttgtggtttccctccttccacactggagccataccagcccctctccagtgggagcccaagttgctgattactttagccaaactcagccattctggtctctatcctgatccctttaggctaacaagaaggaaagaaacatcacatgaaagaagggccatgtgcaacttatttttataactcaaggaggttccctgactgccattttacttgccaatagacatgcacgtagaagagaaatggcatgtcctgtccatagaaataacacgtggtgggtgggcatggtggttcatgcctgtaatggcagcattttgggaggccgaggcaggaggactgcttcagcccaggagttcaagatcagcctgggcaacatggcaagaccctatctctgcaagaaaatttttttaaaaattagccaggccagctgagtgtgatggctcacacctataatctcagcactttgggaggccaacgcgggtggatcacctgaggtcagaagtttgagaccagccaggccaacatggcaaaaccccatctctactaaaagtacaaaaattagctgggtgtggtggcaggggcctgtgattcccagctactcaggaggctgaggcagggagaatcgcttgaacctgggaggtggaggttgcagtgagccgagattgcaccattgcactccagcctgggtgacagaataagactctgtctcaaaaaaaaaaaaaaaaaagccaggccctggtggcacatgcttgtagtcctagctacttgggaggctgagatgggaggattgctggaacccaggaggttgaggctgcagtgagctatgattgcaccactgcactcccacttgggtgacagagggagaccctgtatcaaattaaaaaaaaaaatgcaggtggtgtttcagggcaatgaggctgcctgtcctgaagtgttcactttttcctcccagggaagccacactatcccagcctttttctccctagggcctctgcatcttctcagacagcacaggctcggataagggatcatcacttatcacctagccaggatagcagccacggctcacttccctcttgggctgtcaggtgacaagagaagctgtgtccaggagataccacgtctcgtttgcccaacatctgatcacctgcagctgtcttcagctgctcagtggttcacacatgcatatgcaggcatatgtgaacacatgcacacaaacacgcacgcacacatgggcattttatggagggccaatgacttagcacttgggacgatctcttccgtatttgccactgtttgggccccattagggaggttcccatcctgtggcctagactgctacaagaatgaagcatcatctgtggacatttcgagcctgggctgtctgagcacacacactttacaggtacctggcttcaggccacttagttgcactgaagccccagggcttattcctgcgcctctgtagcctagattcgtcagatggtgatggagagaaaacactcaccctagaaagtggtcgtattaaatgaggtgtcaggtgagaggctcccaacgtgccccctgaggcatctgttgttgcactgtctgtggcaatggtctctgctgcccagaagcccatggcacttgcccaccctgtgtcccttggcccacagctggctcttccttccctgagccagaagggcttggattcttaggctgtgcatttacaccctgcactctgagctccttggaagcagagctgtgtatttactgactcaaaatgctacagcctaatgtgtaacagttgctaaatagataatttttgattaattagtggaaatatccagctcccactgatggtcattctgacttggaattcttcactgaactcaaggaataaacacctccgcatccagcctggtttcagagctgcagtcagtcttgtcaacagttgtttccagcttttccagcttgatggtgaaaatcccagaattgcaaacaagaaggacccctggagggaaactcaaaacctggccattctaagacctttgtcatttttccttctttctctgctactatcacttatggtatcatgaatggacacaatacatttccaagcagaatctctgaaccttccaaactcattaaattcatacattgtaacttgactcacctgccttattaaaaccttaccaacatttttctagattatgaaaaatatgctataaaaaaatttggcctggacatcttgcagtgttggccaaagggccggtcccgtcacccctcccatatgtccatctgggttactatttatatcaccctttaaaccagatcattaccctcatatcagaaaaatagcaaaacagaaaatggaacatgggaaaagttagccacagcttgcttttactgctacatgtgacctcagaaggcctggccactgtttgaaaagtctaatcctagacaacacatatggctggagaaggaaccttgaccacagcagagtcttcgatcttctcaggggcaggaggacttcactgtgctcttctgatagccaggaacaggcacctaggcgggctgccccgaatcatggggacatgcagctcatggcaaggaggaaaatgagccatactgagtcctgggaaggcatttcaaacacacattttactcccacacatttgaccacctatagttggaagaaaaaataaggttaattcaaaaaaaaattctttgagacaatctcactctcttgcccatgctggagtgtggtggcatgatcctagcacactagaaccttgaactcctgggatcaagggatccttccacctcagcctcctaagtagctaggactacagatgcatgccatcacacccagctgactttttatatttttactttttgtagagagagggctcttgctttgttgcccaggctagcctcaaacctctggccccaagtgatcctcccatccgagtctcccaaagtgctgagattacaagtgtgagccactgtgcccagctgttaaaaaaaacaggatgtgtctattgtcacctgccattgcagccaataatcatgtgccccagagcaagcatgaaccatatagctggtctgtctacagcctcagctcctgtgggtcacccattgtgtaagtgtcccatgacattgagtgcagtttcagtatttaaagctttctttgcttgcttgtttgtttggatacagtatggaccttaactgcaagctaactgtttcatctaatgctcagcgcatccctggaggaaaacttggctgtgttggggccatttgagaggatttttagatgttccagatggtagcttgatggcaactgacacaggagaatttccaacttgtgcactgactttagatcctaacttcttaggcaactctcctcaaagttcaggtcttttggggcaaccctcatttcgtgactacctcgggctgagtcatgactgctcactgtcattgtattcgctttctgtggctgttgtaacaaattatcacaaactcagtggcttaaaacaacaggaacttggtatctcacagtcctggggttcagaagtgcagcatagcctcactgtgttaaaatcaaggtgtcacagtgcagcttccttcctggaggctctagaagagaatccgccttcttgccattcccagcctccaggggcctcctgcattccttagcttgtggccccttcctgcatcttcaaagccagcagcgttgcctctgtggctgttcttccagtcacatctcccctggttctctgctgctgcgaaaggcgctctgattttaaggactcatgttaagtagattgggcctatctggagaatccaggctattctctctattgcaaggtctctaaccttaatcacatctgcagagtcccttctgccatgtaagctaacacatttacaggttccagggactcaggagtggacatctctggggaccattattctgcctgccatagtcatctcttctttctttctccacccattaacaatccatggaatctttctgtattttctagttatagttaccaagctgtgttagtcaaggttctccagagaaacagccccaataggagatagataggtgatagatagacaggtggacagaaagggaatgagattaattatacagaactgccccatgtgactatggaggctgagaagtcccacagtctgccgtgtccaagtggagacccaggaaggccagtggtgatgttcaaaggcctaaagaattaaatattcctctaccttttggttatatttaagccctcagtggattgggtgatgcccactgatattggggagggtatctgcttgatttagttcaccaacccaaatactaatctcttccagaaacgccctcacagccaccccagaaacaatgtccaaccagctatgtggacatcccttggcccagtgaagttgacacataaagttaaccgtcacacaagctgaagaatcagattggcctgcgataggtctccccattctgcctgagcaggcactgattttcacatgggatcacctcacgggtcactaaccagtcagcagtcggctgccctggctgtcagctggggtgggggggtcacatggcactcactatggctgcctgcttacgaacaggcgaagactcttgcagcccagagctgtctccctccaaaggcagtggtaagcgggatgagctgcaggctgttatgtgtcctgggatgggaatcaggcttctcccaaacaagtcaaccttcctggggactgcagctttgtgctactgcagctggaagcccagcaggactgtgggtctgagccagcccctgagttgaagtgtaggaggacaagtcacagacaaaacccctcagacaccgagttaaagaaggaagggctttattcgaccaggagcttcgacaagactcacatctccaacaactgagctcctgagtgaacaactcctgtcccttttaggggctcacaactctaaggggggtccgcgtgagagggtcgtgatcaactgagcaaggagggggggtacatgactggggtctgcaagctcctgcgtcggtaattagaacagaacaggacagggattttcacagtgcttttctatacagtgtctgtaatctatagataacataaccaattacatcaggggtcaatctttaattaccaggcccagggagtggtgccaggctgtctgcctgtggatttcatttctgccttttagtttttaattctttctttggaggcagaaattgggcataagacagtatgaggggtggtctcctcccttagaaggggttgtggcaccagtgaattaggtcattgccagaccattttatagaccaggaaactgaggcacagaaaggctcaataatttgcctaaagcagctcagcttggagaaggcaaagcaaggatttaaacctaagtgatctggcaccaaagcctgcactcctagccactgctcaatgctccaccatcggccacctgtcctggagaaggaggagcacttgctgtgatctcttaattgaaaaacaaggccgggcacagtggcttcccagctctttgggaggacaacatgggaggatggcttgagcaggagttcaagaccagcctgggcaacaaaaacgagactgcatctccacaaaaaactaaaaatgagctgggcgtggtggcgcctgtggtcccagctacttgggagtcagaggcgggagaatcgcttgaacccgagagatagaggctgcagtgagatctgattgtgccactgcattccctcctgggcaacagagccagaccgtgcctgccacggtacgctggtgtcctcttgaagagggggctaggcggggacagcggtacccacggagtctcggagtctcgaggggcacgttccctcagggctcccaaggggcgcccacaaggcgccaggctgagccggcgcagccaaatctcctcagggctgcggccgcccatcctgggaccgcgcccctgcaccatgtggacggtgcaggctgggctggggtctgacgcccgaggaccccttccccctgcccagccctgcccccgcaggcactggagggctcccctaggcggggctccgggctagggaacagggatgcccagcaatctcgcgctcccggggccggactccagcggcaggggcctccccaggctgcggctccgcgccggtgacgggggctctgccgaagggctcctgcccctgcctagcctggcccatgctggtcgcatcaggggctccattcaacagacgaccgctccgggcctggcgcgggcaggggcgcgcagtcaccgcctactcggctccttggcttaggctccccaaccccctgccacaggaggccaccccaaacttcgcctgtccaggcgagtgctcgggctcggtcccagccccgcctcctgccgctgtccctccctccctctcgagcctgcactgggcccgggctgtcctcctccgtatccttgtgggtgattgtacgtccaggtggccgtcgcgaggcaccttagactgggcagcttagaaacaacattgctatctcgtggtcctgggagtctgcgctcggggtggcagcgtggtcgggctctggaaaaggccttcttcccggttgcccaagaccaccttcttgctgtgtcctcacttggacagagggagctgctcctggcctcttacaggggcaggaatccttccatcctcatgacctggtcacctccccaaggccccagctccttataccttcaccttggttcaggtttcagcagaggaatttggagaggggcacacaaacattcagtgcattgctgtgggcttatatcttcttttgcgtcttctggccccttaaaagtcggagtcttaaacctttcctccggtaggggcctagtttgtaggctgagtacagtcaccacatacaacacaggatgcccaattaaatttggatttcagataaacaatgaataatttctttttgtttgtttttttgagacagccttgctctgccactcaggctggagtgcagtagcttgaggtcggctcactgcaacctccgccttccggattcaagcgattctcctgcctcagcctgtcgagtagctgggattacaggcgagtgccaccacgcccgtttgatttttgtatttttagtagatatggggtttcaccatgttggccaggctggtctcaaactcctgacctcgtgatctacccgcctcggcctcccaaagtgctgggattcaggtgtaagccaccgcgcctggccaacagtgaataatttcttagcgtaagtacacctcctgcaatatttgggacagactcaggaattattggttgtttatctgaatttcagattttgctggcagccgtgtaagagccttgggacaggcaggtcactctgtgtgacaggggacagccagaggcccaggcaggaggagcaaatagtgaagcctgagtgaaccacccaggcaggtcctgagcccccaccaccaacatccggtttatggctcttctcagtctccaggaggaggtttattttctcctctgcttcctgggcagctgtccagtgcccagcctgactgctggcagccctaagcagatacactccagatgcagtgtgacctcctcgttgccacctcttggggaaggaaactgtgatgggctccctgccatcctacaaccatggcacccactggaggtgtcttgttctaaagcccagtggcctattccaggccctggtaggaaccaatttggattatttgacctgaattttccagccaaagccttcaggaggtgcccatccaatcccactgcaacccgttgagtcattcctgcatctgtcctctacctgccagcttctactcacctttcaggactacctaaagcaagactgccttagagaaacacctctccattcccccaccccaattaaactgggctccctgaaaaaatgtggccttaatttttccttcagggccatcatcagatgtttaactctccagctatgggtgtcattttggggtgaatgtctgtttcccaccctcaaccagggactacaagctgtgccagggcaggtacctgtgtctttggtcacctagtgtgtcctggcaccacctcctcagcaggaaatgggtgccttgaagcccagtggtaggcatgttgcaagggttgagcctcctgaggtcaggagacagccaccaggtacagcagtggatgtgcccagtgggtgggaagggaagggaagggaggccaggtgggatgccaggtgggggcagaggaggctccagtggccagctgggtgtacaggatggaaaagacccactttctccagccactttttataaaaaataaaaataatttttttaaagaaaacctttgttcatgaagaaattgggtgaatgtgtctagacaagattgattgtaatacagacccaaagacagtttcaattagcgtcagcgtgaaatcctgtaagccagagttttaaaccttttccctagaccaaagtaccccagtggcccccagggggtctcagaacacagtttgaagctgtgtactacagtaatttttttttgaaatcttttattttgaagccttataaatgcttcagagttttcagaaactcaaatactgaatgttctcattataaatgggagctaaataatatgtacacatggacatgcagagtggaataatagacacgggagacacagaagggtgcgaaggcggaagggagagtgaggcatgagaagttacttaatgggtgcaatgtacactattcaggtgatggctataccaaaagcccagacttcaccactgttcagtatacccatggaacaaaactgcagtcgtatcccctaaatttatacaaaataaataaaagtttctgttccccttatgacatagcaatgattgtttcatataaaagtgactactttcaggccagccacagtggctcacgcctgtaatcccagcactttgggaggctgaggcgggtagatcacaaggtcaagagattgagaccatcctggccaacatggtgaaaccccgtctctactaaaaatacaaaaattagctgggtgtggtggcacgtgccattagtcccagctattcaggaggctgaggcaggagaatcacttgaatctgggaggtggaggttgcagtgagccaagatcgtgccactgcactccagcctggtgatagagggagactccgtctcaaaaaaaaaaaaaaaaaaatgttgactttccccaccacaaattttcacataaaaatgacacgccagaaaggtgcatcacagcaccgcgcaggtatttgtgacaggcctcatcccttggaggctgcgagcccagctggagaagcacagcagggggccaacgggatgactcacagattgcacaactgtaggcatctgggagctccctgctgatggtcttctcagactttcaacaggtcttctataaaaattctctcgctctggaattgtttgtatatggcaatgtgggaaaccaatgtttgagtccaagaacatgtgccaggcttccggccttccgatcattccaggatgagtcagtgagccagtggggcacccgtgtgagttttatcatccatctccccaggccatggaggatttctcccctgcttcagacagtcatagacaatggaaacctgtttccagaaagcagacaagctgagcctggggatttggcaaatctcaatcagaactggctccaagcatcttctaggtctcacttacaatttaaagcaacaggcggcttttactcaactggaaggtctcagcctgttcttctgcagcagcagtgatgctatgagatctctgctgctaacaaagcaccactgcaaatggcttctggagatattatccctcttgatggttgctgtcattatctcctttgaaagtgaaatttacctgacacaaaatcagaaactagaagatccattttctgtaatcgtgtaaatgttgttttaaagtgacagttgatgctaaaatacatgttcagtacagaaaataccaaaggcgcaaagaaaataaaaatgtcctatcatcacaccaaaaatgggtaatgaaaattaacatattttttggtagttttatcagcacacgtcagtatcagttagaattaggttaagtggcaagggatagagtcctgaaaaacagtgctttaaggtaagaaacttcctcccttctcattaaaaaaagaagtccagaggtaaaacttccaaagctagcatgctgaattcacaaaattattagggatccaggcaccttttagctctcacatccttaagggagtggcatttatcctcataaatgaaaatggctgccagagttccagtcatcacaactatatcccaggagacagaataaagtttatgtcttcctagaagactcatgtgacactttctgttatatttcattagtcccatggctacacctagcttcaaggaagggtgggaaatctagtctggggttctgttacaaaaaggaaggatgacttgtgtagggaattagaagtctgtgacagtttatatactttttcatcttaaagtttaactctgaatagattcaaacatttatttttacttgactcaaaaaattatgaaaaaatatacagtgaaagaccgtgccactcagtcttcccttcccttcccagatgcgtacacactggtaactactgttatcagtattttgtgtacccttccagagtttcttaggcacatacaggcaaatgtgagtagcatcatatcctcttatttttaaccccaaagttagcatgctatgcattttattctgcacctggctttttgtttttgtttgggtttttttcttttcacttaggcaaatgtctccaagacacattgctatcaatacatagaaagcatccacattctttttttctgctgcatggtattctattatatgggtgtagcatcaattatctagtcccctatgattagggtagccataaaaccaaccatccagattgggacattttcaagagtgaacagggctgtattattaattatactggggcaaaggtgtaaaccagggctgtcccaagcaaactgggatgtagggtcaccccatagatgatgaacatagggactgtttccagtcttttgctcttatgacaatgctatcattattaatgtgcatatgtatatgttcatgtgtgtaagtttcaaacatatacttgctgggtcaaagagtttatgcttctgacggaacatgccaaattgctcctgtgggagctggattaacttgttctcccatgagcatcataggagagtgtctctttaaccacagcttggcccacagagtgtgctatcagacatttggatttttgctggtctaataggtgagaagtggtgtctgaatttagttttcatttgcattttgttataaatgagactgaatatgttttaaaattctgtttgtgttcctttttctgtgaactgctttttcatattcattgcccatatttctttttctttttcttttctttttttcttttttttgagatggggtctggctctgtcacccaggctggagtgcagtggtgtgatctcggctcactgcaacctctgcctcccaggttcaagtggttctcgtgcctcagcctctcgagtagctgggattgcaggcacctgccaccacgcctggctaatttctttctttttttaatttttttttttttttgtatttttagtagagatggggtttcaccatgttggccaggctggtctcaaactcctgacctcaggtgatccacccacctcagcctcccaaagtgctaggattacaggcgtgagccaccacaccctgccattgcctctctctctctgtctctctctctatgtgtgtgtgtatatatatatatatatattttttttttcttttgagatggagtctcgctctgtcacccaggctggagtgcagtggcgcgatctcggctcactgcaacctccgcctgctgggttcacactattctcctgcctcaacctcccgagtagcagagactacaggcgcccaccaccacgcccgactaattttttttgtatttttagtagagacaggctttcaccgtgttagccaggatggtctcaatctcctgacctcgtgatccacgcgcttcggcctcccaaagtgctgggattacaagcgtgagccaccgcgcccggtcccattgcccatatttcttagtgagtgtttggaaacctcatcttggagcttttagtacattggagagatgatgtatgtgatttgagatgcaaatagcttccccagtgattgtctttgtttctgcttatgatgatttgtttttgccatggagaaaatttttttaatttttgtctcttcttttgcagctttgttttttttgttgttgttattgttttgttttgttttaagacagagttttgcttttgttgcccaggctggagcgcaatggcgtgatcttggctcactgcaacctttgcctcccgggaacaagccattctcctgccttcgcctccagagtagctgggattacaggcacccaccaccatacccagctaatgtttatattttcagtagagacaagttttcgccatgttggccaggctggtctcgatctcctgacctcaggtgatccacccgccttggcctcccaaagtgctgggatgacaggcatgagctactgcacccagcccttttgaggctttggataagtcaaagctagaaagcccttccccattccaaggttataaaggtgtgctcctttataaccttctacaactttcattcttctagaactttcattgttttcttttagaactttcattgttttgtcttaaatctttgatgcatttgggatttatcttgaagtacatggtggggtatgaatttatatacattttaaataagtatattataacttttcccatagtaatgcaagcttattgttaaaaagttaggcagtattctttgggaggccgagtcgggcaaatcacgaggtcaggagatcgagaccatcctcgctaacatggtgaaaccctgtctctactaaaaatacacacacaaaaaaaaattagtctggtgtggtggtggatgcctgtagtcccagctactcaggaggctgaggcaggagaatggcgtgaacccaggaggtggagcttgcagtcagctgagattgtgccactgcacttaaggctgggcgacagagcgagactccatctcaaaaaaaaaaaagttaagtagtatttatggtatatatcaaaagacagcagtctcctgttactatcctttccctgtttaccccccttagcccctccagtctttcaaatgtttttttctttctttctttctttctttttttttttaaagagacagagtcttgctctgtcacccaggctgaagtgtgcagtgcagtagcgtgatcatagttcactgtacccttaacttcctgagctcaagcaatcctcctgcctcagcctctgagtagctggcaccacaggcatatgccaccacacctggttattttattttattttgagatggagtctgactctgtcacccaggctggagtgcagtggcacgatcttggctcacagcaacctccacctcccgggttcaggtgattctcctgcctcagcctcccgagtagctgagattataggcgcctgccaccatgcctggctaatttttgtatttttagtagagacggggttttaccatgttagccaggctggtcttgaactcctgacctcaggtgatctgcctgcctcagcctcccagagtgctggaattacaggcgtgagccaccgtgcccagcctacttttaaaatacatatagaaatgggggtctcaaactcctggcctcaagcgatcctgctacctcagcctcccaaagtactgggattacaggcaggagccaccgagtctagcctgaaagtttatttttatatgtatctccctatttataaatagtaatctaacactgttgtatgttaacttcattaattttaagcatgcttcattgttaggttgcatgagaggtcttcccttcaaatagaggtgaagtaataaatgttagtgaactctgtgtcaggatttctgtgcagttagtactaggatttgactgttctctttctgcgtatttgaataattaacctgagttggtaattgtgacctccttttcaaaagtgtaaaaaccagacagcactttgggaggccgaggcgggtggatcacgaggtcaggagttcaaggccagcctggcccagatggtgaaaccctgtctctactaaaaaaaccaaaaaaattagccaggtgtggtggtgtgtgcctataatcccacctactcaggaggtggaggcagagaattgcataaacccaggaggcagaggttgcaatgagccgagatctctctactgcactccagcctgggcaacagagcaagactccgtcttaaaaaaaaaacagatttagggttaaggcgaatgggatgagaggaattccttatttttttctccaaagcaatttttttctgcttatacaaacttattgtttaaaatagctggttgcatttgcctctgaataagcaataacccagcatcggttttatttacttgcacgctttcagcctcgcatttctgagcagccccaagattcctctgcagatgctctacaggctcctatgtgccaggcaccctgccagttgctggagatagaacagtaagtgagacaaacggggttgtgcccttttggagctcacactctggcaggggacgcagacaagaaacagcccaatacacaagatgacaggtgttgataagcactaggaagacaagcagagcaaggcaaggaaagaagagccagagagaggggtgctattctagggaggatggtcagaggaagtccctgagtgggtgacacgatatgagcagatacctgaaaggtatgcggggggaaccatgtgacaatcgggggagagcttgatgggtgggcacagtatgtccaaaggccctgtggcagggacatactggttcactggggagggtcagggtatggggggcagcagaaggccaatgtgagcagcagaatgggcaaggcagctgctagggaatggctcatgagagatgggtagggcagaacctcccaggccctatctgaggaatggcaaagttctgagcaggacctaattaacatttctaaacagtttttttgttgggaggccgaggtgggaggatcgcttgagctcaagactgagaccagcctaggcaagatagtgaaactccatctttacaaaaaaattttaaaaatcagctcagcgtggtagtgtctacctgtggtctcagctactcaggaggccaaggcaggaggactacttgagcctaggagttcgaagctacagtgagccatgattgcatctctgcattccagcctcggcagcagagcaagaccctgtctcaaaaaataaaataaaaatttaaaaataagcaatctctttggtagccatgcagagaagtgattgtagaggcacaagagttaaaaataaaataataggctgggcacggtgactcacgcctgtaatcccagcactttgggaggccgaggcaggcagatcacctgaggtcaggagttcgaaaccagcctggccaacattgtgaaaccccatctctactaaaaatacaaaaaattaggctgggtgcggtggctcacgcctgtaatcccagcactttgggaggccaagggaggcagatcacgaggtcaggagatggagaccattctggctaacatggtgaaaccctgtctctactaaaaatgtaaaaaattagccgggcatggtggcacgcgcctgtagtcccagctactcaggaggctgaggcaggagaatcccttgaacccaggaggcagaggctgcagtgagccgagtttgagccactgcactccagtctggcaacagagtgagaccctgtctcaggaaaaaaaaaaaaatttgctgggtgtggtggcgggtgcctgtaatcccagctacttgcaaggctgaggcaggagaatcgcttgaactcaggaggcggaggttgcagtgagccaagattgcaccactgcactccagcctgagcaacaagagcaagactccgtctcaaaaaataaaataaaataaaagtaaggcctggctagcatgccattgcagtagttcaggtgagagatgaggggactcagcccagcaagggcagagcagatggagcggctgtggagaatgcaggaaggagaggaatccgggacgcccctcagtgcctgctgctgctgacatggagaagactcggatcaagagtcaggcgcaaggtggctttcaacatccaagtggagaaggtgagtagacagggaaatatagaagcctaaagcccagaagaaaaaagaccaagccccctgcctcagcctcccgagtaactgggactacagcgcccgccaccacacccggctactttttgtatttttagtagagatggggtttcacggtggtcttgatctcctgacctcgtgatccgcccgcctcagcctcccaaagtgctgggattataggcgtgagccaccacgcccggccgaggccatgggtttcaagaaagaggaagtgatgggtgacaaactgctgagcagttgagcaaggcctgaggggcggctattgggtttggcaagacgtatgttgctggtggctttacaagggggtgtcaggagtggggaccgagggcagatctcgcttgggaggagttttgctgtaaaggggaacagagaaatggggagatcatcggaaagggatgtgggattagggagggtgttttctttcctcttttttttttttctgaaagtatggaaagataacagtgcattctcttgcctgtgcggatgccagggagacggggaaggagccagattccaggcacacatggagcagggaggctgagcatggggaggctggcggctgaggcgtgtcgttgcttcctacagccggtgcagctgtacaagggcatgggactggatgtcagccagacaaggctgggggacaggtagaggaaataggctggcaaggtggaggcagttgtccaagaggggacacctgaagcagaaactctggagaacatgcagttactgagagtgacaagtctcagccttggccaggactccgtgaaggtgggtcaggtgtgttggagggaaagagcgttgtggaggaagagattgggaagcagaggcaggaggattcatggacaacattgttgaagctgccagaaatgagcataggagtgtctggcgacagaaggacagtgtgaggaggatgagaaaccttccctgagtggtcagagtggctggaggtctggaggtgactgtggcaagcagggctcgagggtgatgtagtccctaagcatgctcttggagaggctgggttgttacggaaggagaggggaggaatattctggaaaagtagggagaagagctctgtcagctgcaggtcctcagagaaggcagggtgtgggagacaaaaacagacaccccttgagagagctgcaggagaaacagcatcttcaggggagaccccgacttctagcagagtgagagagtggagggacatccgagaagaggctgaggaggatgtagaggttttatgatgacaccgtgagttgacactgagagttcccagtggcctactgacaatttgggggtcactaagaggtagacatttaggtcagtttaaagaatgtttgaaccctctggagatgacagtggtgtggaatatgaagtggaatccagactaaaacaggaaagagccaggagcactttctggagtcaggtgaatggaatgaccaggtgagcccaggagccatggggtggactccaagatgtgctgaggctacagtagaaccatcaaggaagaaactcactgaccatgcttttctcagcccagttcatgaggggctgccctggcaggagggctttcctgtggaggtggccaaggagcactgtgctctcctccctccaccaggtatcaaaagtcaacctgctgcccacccgcattcacagcagcactctgaacaatagcagaaaggtggaagcaacccaagcatccatctacagataactggataaacaaaacatgattcatttatataatgggatcttattcaactttaaaaaggaaagaaattctgacaacagtgctacaacctggatgaaccttgaggacgttatgctgagtgaagtaagccagacacagaaagacaaatcctgtgtgattgcacctacatgaggtagtagagtagtcagattcatagagacagaaagtagaatggtggttgccaggggctgggggaaggggaaaatggggagttagtgtttaatggggacagagtttaagttttgcaagatgagaaaggtgaggtgaatggaggtgatggctgcacaataatgtgaatgtacattttggttaatgccaccaaaatgtttaagaggatgttaaaaaatgtcagattggggaaactgaagctatcctattgcctcgaggccacacagttgacagacggctgcagcattggaccagaatgtgtctctgaccccacaccctgcaggggctctgcaaggcagaggaagaatcggggctgtggtgattagaaacagtgagcatcctggggcgaccctgttgagcctcttaggaagaactttttaaatttttatatattttttggagttggtttatttgaatgtgagacactacaattggtttatgtgtctcctttttttttttttttcttttttaattttgagacagggtctcactctgtcacccaggctggagtgcagtggcgtgatctcagctcactgcagcctccgcctcccaggctcaagcaatcctcctacctagtctccagaggagctgggacaacaggtgtgcaccacctcacctggctaatttttgtatttttcctagatacagggtttcgctgtattggccaagctggtcttgaactcctgagctcaagcgatctgtgtgccttggcctcacaaagttctgggattacagacgtgagccaccgtgcctggccaggaagaacgttcactgactcatttgccacattcagatcttacccagagacatttgaatttccaagggtgatgatttgcatcgggtggagcagagcaccatgggcacttagcttagcccaggctcagcaaaaagctgaaatgctcacaaacagcaggccctgggcattatggttattttcctgacctcagtctcaagtgccaaatctcaaaactatcattaaaatgtccatattttttcatttagagaaaacagtgtctgctaaaatccataatatccacctgagtgtttgttcagcacagctggcctgacagcacttgtttggaacttgacaagtaagcctaaattcactgggaaggatgaagctaagaaaatttggaataagaacgaaggcggatgcaccttgcacatatcaaaacacaccatagaggtgcagtgctggccaggcactgtggctcatgcctgtagtcccagtgttttgggaggctgagacaggaggatcgcttgagcccaggagtttgagaccagcctgggcaacacagcaaggccccatctctacaaaaaatttaaaaggagccacacagataggaaagaaaagagaaacgcagggtgtccagatgtaatgtctatgttattccacctggaaatttccccttggagcttagcgcttcaatgctggcctctaccaagagcctaaatccaaggtcaccctgaggcaactcttcatcttactccagaaggctggaaaccttcagtcctccccagcacccactcatgtgtgaagtgagatctgatatctttgaaggacatcaacattgggtagaaatagcctaagaaagacttccatgtccttttccttagcaaggatccacatgcagatctggccctgggatgggcatggtgtgggcatcaccagaggggcagcaggaatgcaaacagacctggcttaagatccagctctgctacttaaccagctatgtgtggtggctctgggaaggtcatccagtcatctgcagcctcagccacttcacctctctacacaggatcaagttacaagctatgtgacttgcttttgtatatcttctttggagaagtgtctgttcaagtcctttgcccattttaaaaattggattatttgtctttttctctttttttttgagatagggtctcactgttacccaggctggagtgcagtggcatgatctcagctcactgcaactgctgcctcccgggttcaagccattctcgtgcctcagcctcccgagtagctgggattacaggcactcgctaccatgccctactaatttttgtatttttagtagagatggggtttaaccatgttggtcaggctattctcaaactcctgacctcaggtgatccgcccgcctcagcctcccaagtgctgggattacaggtgtgaaccaccatacctggcctggacactagacttttattagatatatgatttgcaaatattttctcccattttgtgaactatctttttattctcttgatagtgccctttgatgtacaaaagtttttaacttggatgaagttcagtgtatctaattttttatctgattgcttgggtttttggtgtcatagttaagaaattgttggccgggcatggtggctcatgcctgtaatcgcagcactttgggaggccgaggtgggaggatcactaagtcaggagttcgagaccagcctggccaacatggtgaaaccccgtctctactaaaaatacaaaaattagctgggtatggtggcatatgcctatattcccagctactggggaggctgaggcaggagaatcccttgaacccgggaggcagaggttacagtgagctaagatcatgccactgcactccagcctgggcgacagagcaagactctctcaaaaaaaaaaaaaaaaaagaaagaaattgttgcccaaggtaatgaagatttacacctatgttttcttctaagatttttgtagttttagctcttacatttaggtgtttgatccattttgagttgatttttgtatatgacttgaggtagtagttcaacttaattcttttgcatgtggatacccagctgtcccaggagcatttgttaaaaaggctattctttctcccattaaattgtcatggaatccctgtcaaatatcaattgaccataaatgtaagcatttatttctggattctcagttctaattcatcaatctatatgtctgcccttatgccagcaccacattgtgttgattactatagttttgtaataagttttgaaatcaagaaacgttcatttaaaggtaaaaacctaaaaataacaaataaaaataaagggaaaaaaaggaggtgttagtccttcaattttttttttttttttttttttgagacggagtcttgcactctcacccaggctggagtgcagtggcaccatctcggctcactgcaagctctgcctcccgggttcacaccattctcctgcctcagcatcccgagtagctgggactacaagcgcccgctaccacgcccgactaattttttatatctttagtggagatggggtttcaccgtgttagctgggatggtcccaatctcctgaccttgtgatccgcccgcctcagcctcccaaagtgttgggattacaggcgtgagccactgcgcctggccttgtttttctttttcaagattgtttttgctattctgtgtcctctgcatttccatataatttttaggatcagcttgtcaatttttgcaaaattttgagagattgcattgaatatgtagatcaatttcggtagcattgccatcttaataatattgtcttccaatccatgaatatggactatggactgtctttccagttatttgggtatttttaaatttatttcaattatgttttgtagttttatttgtaaaagtcttgtgcttctttggttaaatttattcctaagaattttgtttttgatgctaatgtaaatgaagttgttttcttaattttaagattattcattgctattgagtaaagatacaattaattttatattttgtccaagatactgatcttgtattctgcaaccctgctgaagggcatttatttgttctaaaaggttttgtttttgttttgtggatctcttagggttttctatatacaagattatggcatttgcaatatacatatatgtgtgtgtatatatatatatatagagagagagttttagttctcctttctaatctggatgcctcttatttgttttttaattttttcttttggctttatttccctggctagaacccccaatacaattctgaatagaagtgagagcaaaatccttgtcttattcttgatcttagagggaatgcttgcagtcttttatcattgaatacgctatattagctttgagtttttcatagatgtcctttatcaggttgaagatatttctttccatttctattttgttgatttttttcaaatcatgaaaggatgttagattttgccaaatactttttctatgtgtattgagatgatcatgttatttttcctttattctattaataacatgtattacataattaaatcttattcattaaaccaacttagcattcctgagataaatcccacctgatcatagtatatattttatttatttttttatttttttgagatggagtctggctctgtcacccaggttgcagttcagtggcacaatctcagctcactgcagcctctgcctcctgagttcaagcaattctgcctcagcctcccaagtagctgggactacaggtgcatgccactatgcctggctaatttttgtatttttagtagagacagagtttcaccatattggccaggctggtctcaaactcctgaccttgtgatctgcccaccttggcctcccaaactgttgggattacaggcgtgagccaccgcgcccgacctctatatatcttatatcctttttgttcctctatttctccattgttgacttcttttttgttaaataggtattatctagtgtacctttttaattctcttgtcaattatttgttaaaatgtcagaatatataatgatataaaaaagctttcttcctatattgttccatttcctcctctccttttggctattaacatcatacaagtaatgtctttatacactgtgtgcccatcagcacatatttctaattattgttttatgctgtcttttgtattaattaatttatttatttatctatctattttgagacagagtctcgccctgttgcccaaagtggagtgcagtggtgcagtcttggctcactgcaacctctgcctcctgggttcaagtgattctcctgcctcagcctcctgataagctgggaccacaagcgcatgccaccatgccacctaatttttgtattttttggtagagacagagtttcactatgttggccaggctggtctcaaactcctgaccccaaacgatccgcacactctggcctcccaaagtgttgggattacatgtgtgagccaccgcgcctggcctgtatttacatttcatactctcttttatagttgtctttgtagtagctttttctggtgtactttatttcttcatgcatattgagttattgtctagtgtgctttcatttcagcctgaataaatagctttagtatttattgtagatctcttagtgaatttttgtttatctactctcttaatatctgcttcctttttgaaggacatttttactagatagagaatttttggttggcagtttttttctttcagagcttttactatgtcatagtagatggctcttatggtctccatgacttctgattagaagtcagatgttaatcttattgagggttccttgtacataataagtcacctttctcctgatgccctgaagattctctttgactttagcttttgacaatttgactgcagtgtgtctaggtgtagatatctttgattttattccacttagagttcactgagtttcttcgatgtacatgcttatttttttcatcaaatttgggaagtttttgaccattatgtttaaatttttctgtttctctctcactctctttctagtactctgattttgcgtatattggtacacttaatgatatctccaaggtctctgaaactgttgatttttcttttatcttttttctttctgttcctcaaattggattatctcaattgaccagtgcattcaagttcactaatttttacttttgcaagtccaaattcgctgttgtgcccttctattaaatttttcatttgttattgtacttttttttttttttttttgagatcgagtctcgctctgtcgcccaggctggagggtggtgtcgtcattttggctcactgcaacctctacctcccaggttcaggcgatcctcccacctcagcctcctgagtagctggaattacaggagcgtgccaccatgctcagctaattgttttgttttgttttgtttttagtagagacggggtttcaacatgttggtcaggctggtctcgaactcctgaccttgagtgacctgcccttcttgccccttggcttaccaaagtgatgggattacaggcatgagccaccacacctggcctgttattgtacttttcaactccagaatatctatttgattcttcatcatttccatctctttttttgagattctctatttggtgagacatctttctttcaattgtttagacagattcctgtttatttatttatttatttttatttttattttttttgatggagtctttctcttgtcacccaggctggagtgcagtggtgcaatcttgtctcactgcaacctctgcctcctgggttcaggcacttctcatgcctcagcctcccaagtagctgggattataggcctgagccaccaccctcagctaattttgtatttttttagtaaagacaggatttcaccatgttggttaggctggtctcaaactcctgacctcaggtgatccacccacctcagcctcccagagtgctgggattacaggcatgagccactgcacctggccccttttaattttttgaacatgtttaaaatagctgatttaaaatctttgtctaggcctcaggcgcagtggctcatgcctgtaatttcagcactttgggcaccggaggcagaaggatcgcttgcagccaagagtttgagaccaggccggaaaacaaaatgagaccccatctctacaaaaaaattaaaaaattgtccagcatggtggcacatgcctgtagttccagctactcaggaggctaagacaaaaggatcactggagcccaggagttcgagactgcagtgaatcatgattgtgccactgcactccagcctggacaacagagtgagactctatctctaaaaaaattaattaaataaaaataaataaaacatacatacataaaatctttgcctagtaaacctaacatcctgactttcttaggagcagtttctgttgtttcttttttctcctgtatgtgggccatattttccttcttatatgcatgtcttataatattttgttgaaagcacaacatttaaaataatacaatgtggcaactctgaaaattggatcctgccaccccagggtttgtggttgatactgtttgttgctgttgttgctgttcatttgtttagtgaatttcctggacaaattctgtgatgtctgtattttttgtcacatgcagcagctaaagtctctggctagttagcttagtggtcagctgataattggatagcaatttccttaaatgccttgaatctatagtctcccagcctttgcaaaaggacttagtgtgtgtgttggggtacactttcaccattgacaactctactttagcctttatttcctgcttatgcacagccccaaagtcagccaaaggtgacagattatggcattttcatgtctttcctgggcctatgcacatgcacaaggccttacatattcccaggaataagagcttttcttttttccttttcttttctttttttttttaatggagtttcgctcttgttacccaggctggagtgcaatggcgccatcttggctcactgcaacctctacctcccaggttcaagcgattattctgcctcagcctcccaagtagttgggactacaggcgtgtgccaccacacctggctaatttttgtatttttagtagagacagggtttcaccatgttggtcaggctggtctcgaactcctgatctcaggtgatccactcacctcgggctcccaaattgctgggattacaggcgtgagcgaccatgcctggcctgaataagagcttttcaaagcctcctatggacatgtcattttttagtttttctttttaattttttaccagcttcttgttagtcctgcctggtattgacatttcaggcaactgcggtttaaacttttccctcatccacccctaagcacacacacttttccacgcctccatttcctcaagacagttttatcatgctggttgtagtggatcatatctgtagtcccagaattttgggaggccaaggtgagtggatcacatgagccctggagttctgcctggcaacagagggagactttgtcaaaagagagagaaaaaaaagaaggaaggaaggaaggaagttagaaaggaaggaaggaaaggaaaggaaggaaggaaggaaaagagatttatcaaattttttcattaaatcaatattcagtgttctttttgtttgtttttgtttttgtttttgagatggagtcccactctgtcgcctgggctggagtgcagtggtgcaatctcggctcactgcaacctctgcctctcgagttcaagtgattctgctgcctcagcctcctgagtagctgggactacaggcgcccgccaccacgcccggctaatgttttgtatgtgtagtagagacgaggtttcatcatgttagccaggatggtctctatctcctgacttcaggatccacccaccttggcctcccaaagtgctgggattacaggcatgagccaccatacctggctcatattcagtgtttatatcagagtttcccagtaggagcaatattggcgttttggtgggacagttcttcattgtaaaggatatttagcatctctggtctctgtccactaattgccagtaatggttatataacagtgggaaccaaaaacatgcctacatatttctaaacatgctcttgagcttagcaggcagtatcacttggttaacaatctgcttcacagtatttcgactgtataattaggtttacactgaaacatatgtactgttattgcattttctgtcttcaactttcttttttttgtatagttactaattacctcccttatttgtttagtttcttagtaacgatcactatttgctaagatctccgaatgtatatcaaatatctctccataacatcaaacatagcaagtaattgcttctttctactcttactttatttatattatttatttttttgaggcagagtctctcaccgttgcccaggccggagtgcagcggtgggatcttggttcactgcaacctccagctcccgagttcaagcgatcctcctgcctcagcctcctgagtagctgggattacaggtgcccgccaccacgcccagctatttttttgtatttttagtagagacagggtttcactctgacaggccaggctggtcttgaactcctgaccttgtgatcctccctcctctgcctcccaaagtactgggatcacaggcatgagccacagcgcccggctgcttctttctactccttcttggaaacagtcctcctggagccttctgtcttttcacacaactctgaactgattaaccaggactgctgcacagcagacattctggggcttctcttcaccaccatcctggtaattggactcaaaaaatgtgaattggaaaatccaagttgtctccactgcctgtttgactgggggaggctgaagaagttcaggataatgcagagcataaagaagttacatggccaggtgtgctggctcacgcctgtaatcccagcactttgggaggctgaggcgggcagatcatgaggtcaggagattgagaccatcctggctaacacatgaaaccctgtctctactaaaaatacaaaaaaaaattagccgggtgtggtggcgggtgcctgtagtcccagctacttgggaggctgaggcaggagaatggcatgaacccaggaggcggagcttgcgtgagccaagatcacaccactgcactccagcctgggtaacagagcgagactctgtctcaaaaaaaaaaaaaaaaaaaaaaagaagttacattttctctgaatgtctgagggcagagtgaatgtatgtgtaacattacttcatacatatatggaatgaatactctttaatgtgcttctatatttatcatataatttggtccttattttaactttctcatttcagatttgaggaaattgaagtgcactgcctggcacccactttacttctgaaacaatacatgtggtaacagtattaagtgctcactattttgcaaacattgttcaagaaccctaggaaagacagtacagaataaatagaaagcaaagtctttttgtccaagaacttaaagcccgtcagtgttgggaacatgcgatttgtgtgtgcaatggtgcaggagtctggtcgtgtccatctctggggtgcagagctgcctctgaagacttggcaagacctacccaacagtcgttcactgagcagagactgaggagcctcctgggattgggctcatcctcaggaaaagcggagccagtcccaagcttgaaccagtgacaagtccttggatgtcggagagaagtagaacgttgaggtacagtaagaaacccttgttgacttccagaagtgcttgagggattttgtggggagctgaggcctggagagagtcagctgttctgaaatgtaggctgtgactcctgatgtgtgccatctttatgtacaagccagtgaggcctagagctctcaggttagacttaaaatttccctctgacactcacacagacactgaggggcaatgtgcactgtactcttttcctctttattttatagagccccaagtttattcggagggtaacatatttgggaaaggtatgccccttcctcttccccatggaataaaccatatttggtcaaagccaggcatgatcattccatttccctgtgctcatggttggtgtagggtagcaagtgatccacgacttcacctcatgataaacggtagggaggctagccctcttctgcattgaatgaggttgcatgagcaagcaatgcttgcagctgtggcagcctttttgtaaccatgtggcaacaagcctaagaggaaagctactgaagatggcagagcagaaagagagaacctgggcctgtcatgatatttctgggaccatctgtatgtcacctggattctgctctggcagttgaggcaggatgagaggggtgagagatgagacgatgtgtactagcagtctggaagaggtccacggagggtcagtttgttcaggaagcatacccttccactttcaccagtgaaagtcccacttgagtttctagggctctagtcctaacctaaccagatgctttcatcactgcagttgttttccaggagtcaggatctagaggtagtcagatggcagatggctcctcctgcccctttttagcctgaccctgtgaagtagatattgttatcccatcttatacataagaaataggggcttagaaagattaattgacttgtccaacatcaacagcagagctgggaatcaaacctggagtctctgttgctaagacctgggctctgctccctgcacaccaattgctttcaagactaaaccagctgggtgtagtggctcacacttgtaatcccggcactttgggaggctgagatgggaggatcgcttgagcccaggggttcaagaccagcctgggcaacatagtgggacactgtctctacaaaaacattacaaattaaccaggcatggtggtgtgcacctgtagtcctagccacttgggaggctggggtgggaggatcacctgagcccaggaggttgaggctgcagtaagctatgatcccaccatggtgctacagcttcagtgacagagtgagactcttgtttcaaaaaaaaaaaaaaaaaagactaaatgccatgactctcttcggattccacccttcctcctcgtgtttcctgaataataacctgttaataataattattataatatttaataataataattggcacccccatggacccagtgagtccagctcaaatcctagcgtggatcaggggttgaaggagtcaggaaaatgtatgattcatttcacaaagactttgtgaagaggggcgggttgttgtgtgagtcagagggtaccaggtggggctggggtggggagaggacggagaagggaaagctttgctggtgagggacaccggggacctgaaactcagtggactgcaacacagacgggaacagggcacagccctgtgctggagacttcctacttgggtgctatcgtttggaaatctgtcctcccaaatctcatgctgaaatgtaatccccagtgttggaggtggggcctagtggaagcagtggagcagtttctgatgaatggtttagtgccatcctttttagtgctgtcctcatgatagtgagtgagttctcactagatccggttgttaaaaaaggtgtggcacctccccccacctcttgctcctgctttccccatgtgacatgcctgctcccacttcaccctctgccactagtaaagctccctgaggccccttggaagccaagcagatgctggcactatggtttacaggctgcagaactgtgagccaaataaacctcttttctttgtaaattacccagtctcagatatttccctatagcaatgtaagaatggcctaatacattgggtgattcagggaaggtttcctgatggaggttgggctctgaaaaggggaaatggtgattctgggcacaggaaatgctagagcagagcccaggcccagcagctgcagggcgtgcaggaaccactcatagcaaccagccagacaccgttcgcctcctctccctctgcaaaatctccactcactcctttggatattgctctgaccatccccgccccgtcctgtgacctctgcggactggcatcccagcaggatggcccagctctccagcctggcagccagagccttctccactaggcctttttctcttcactctcctgggcatggcacccctgggcaaactcctaactaccacctctgcctggtatagctggaaccaccccactgtgaagcctccctcactctgtaaaagccagtaccccaggaagcctcctctaaccctttgccctctgccactccaaggaagtgctattggaggagctgcctgatctctctggccttctgtgtggcagcagaagtttgtgtcaactgctgtgggaacgtgattggtggagcaggtgattccagaactcacgtgaccaggacacggaatgtgtgggcttgccaatattttgatatataaatcaactgttttcattatggaagtaacaaaacctcaagggaaatagaaaaaaaaattccctgtaatcatcccacccagctaggaggtctactgtgtgtgtttttgacattttgctgtcctcgttggtgcaagggcagatgtgactgtttatgcctgtggagggcagaggggtttttcttcttcttgtctttttttagagacagggtctccctcttttgcccagcctggatggaatgcagtggcatgatcccagctcactgcagcctcgaacccctggcctcaaaggatcctcctgcctcagcctcccaagtagctgggactacaggcacctgccaccgtgcctggctgatttattttttatttgtttgtttagagatggggtctccctacattggccaggctggtcttgaactcctggcctcaaatgttcctcctgtcttggcctcccaaagttttgggattataggcgtgagccatgttgtcgtcattacagctacattgagatataatttatgtgccacacaatgcatgcctttcaagtgtacagttcagtggcattgaggtatatccacagaaccgtacaaccatcaccacattgagaaaatttttatcaccctaaaaaatcctttacaaaatcctttaccctttagcagtcaccccatgttttgatttttgctttacatgattttacaagcatcttttcctgttgctggaaaatctccttacccatcctctttggtgactgtcagcaaaggctttcgggtggtgaaatagcgtggccaggagtgctctagaacaatggtgttggtgagggctgcagaagctgaggacccacaggcagagagggagggatggtagaagcaggtggtgaggagggactcggggcaggactttgggggtaaaaggaagcaagtctctggaagcagaaccagcagcactgctgatcattgggacgtggagaaaggcgaaggctcagggtgtcagcaaacttcctagggtgggtgagggttgccaggtcaataacgaacagggtcccaggaaaaggcggcagcacaggtttggggagaattagagatgagcttggttttggtcttgttggatttgggggcaccagtctctctcctggcgagagtcggcagtggggtgttaggatctggccctcaggaggctgttagggctgaagcaagagatttgggagttaagggtgtgagggccacgtgggaggcctcgggagcctgtgccgatccagggtgagtgtgaaggaaagaaaaaagagggcccggggaacactggtattttcgggcggtggacgaggatgggacggccacgagcttgtcttaaggtagaaggcagagcggggccgtaggggcagtggcgcgggcgagggtggagaacagcgctgagcctcgctgggaggcggccggagggggctgcagcccccgagggctccttgcagtccggccccgcagcctggagacagctccggtggtgctgcgctgcccgagactgctgcacgagcggggactgcggcctcggctccctgcctgcccggcagccccccatccagtcggcctgcccggggtgcgcagggttagcctggagtgagctcgccccgcccggggttgcgcggccctggggggtcctctcgcggcggctcctgggacctgctggcgccccgggcagagcccggccccatcccaggagtcgcccggactggaaggcagtgcgagcactgggacacagcctccgagctcgagcgtgacgggaagttggggcaatttgttagttatccgccgccaccaagacgcggcacggcgcctggaccggaggggccccgcgcgggcgcgaactttgggctcgggcgagtgggtggtgctccgcccagcccgagacgggcgggcgcgcgggccaatgggtgccgcctcttggccgcggggggccccgacccgtgggtcccggccaccagcgccccagccccgaggctcagaagcggcaggcggaggcgcggtccgggcgctatggccatgcccggcgggtctcacgcggctgcccctcgcccggcgcgccttcggtagggggcgcccggggcccagctggcccggccatgctgctggagacacaggacgcgctgtacgtggcgctggagctggtcatcgccgcgctttcggtggcgggcaacgtgctggtgtgcgccgcggtgggcacggcgaacactctgcagacgcccaccaactacttcctggtgtccctggctgcggccgacgtggccgtggggctcttcgccatcccctttgccatcaccatcagcctgggcttctgcactgacttctacggctgcctcttcctcgcctgcttcgtgctggtgctcacgcagagctccatcttcagccttctggccgtggcagtcgacagatacctggccatctgtgtcccgctcaggtgaggcgctcggcgtcgcccgaactcggggccccgtcggagctccgaaatgggtcgtcttctccaggccggggttcctccctcgggggccccagacgggccaggctgggggcgcgcggggcgcttggagggctggttcccagcctggccaccccgcaacgctagaccagtgcgcccgggcacccaagacatcccagatgcgcgtcgctctaaggagatctgcgtagggacagctctagggggtccggggagtgcggtccccggcgcccggggaggcgccgtggaaaccccggggaaagcgtcacccccggggaaagcgtcacccccgtgggcgggtggagcccggggcgcgggagttttggtgatcacatctccactcctgccacgaaggccgttcctaacactcgcccgcagcggcggtgcagcggcagtcccgtgagtgctgcggctcccggaggcccgggaggttcccactaagggcaaggcaactttggacgctgggcattcgcaccgtcagaatggacacgcatgagccagcttcagaacgtgtctgctgcggagaggcggcccggcccatcccaggggaaggtgtccgttaactttggggaacgctacggactcagattatatacttttaaaaggagttacaatgcttcctcgtgtctggcaaacggccttacagcctcactgcccttgtgtaactatttatctcctgctgccctgttgggagcgggctgagaagtgcagaaaatggtggcgaacttacttgtccactctttctcccacactgagaaaatctaggattcaggggatggagtcagccagcgaccagagtggattcccagttggagctgatgacttcaacattgagagtttgttgaaagtatttattctctgtctttggtgcctgggccactttggcatttctgaggagagcttgagatctctttaaatttggagctgagacagggaaactaaatcacagagtaggaaggaagggaaggaattcatttattgggtgccaactctgtgcagacagtttataataaacgtgtccccagcagtccttgcagtagtaccagaggacgggtgctgtaaccttcatctcgtagaggaggggtgatggcccagggaggttggagtcttgcccaggatggtgtatcagggatgggtgtcagagccggggcttgaactcacagctggcaccgtgtccccacccatgccatcaggccactctgcaaggccatgtgtggcaccgtgtttaggagtcagggagaaaagtgctctgctgttttgggaggaggagcctgcctgcagtaaactggtggttgtaggggaatgtgtttgtgggaatggagccggagaatgctcccagaggccatttgagtaggcagatgtgttgggcctggtccttgcaggttgtttcgtgggtcccagcaggaacaggagcctcctgcttgggagggctgtgagccttatgtgggtgtctggccactccatgtgctgctgcccgtgctgttggaccaggaggccttatgtctcccatcaggtgtgacagcccagggatttccaaggcttagggaggacagcagtttcttctctctcttctggatcccttccctgccttttggtgtcatcgttgttacttgatggcattttggatgttttgcatccagcagagcagtcacaagccccagcctgagttgtccatctaatggaaaccccttggacttgccctggcagagaccagagacccagagaggagttagtggaacaatctcccaggccacagggagcaggaagttccatgaaagtttaaatctgttccttcttgtcctggtttgtgctgggtgaggtcttgaaaaaaatgggtgtgggtgtgttaaggggaaagtgctgtgaatcacaggccctgagcttctttgcattgccaagggcaggagggaagaacactgaggctcgccccatcctgccttcctggcccgtccagagcttggaggtctggaagaggtgcacaggcagtccccagctccctgccccagagttagtcgtctgacctggccacagcaccaccccaaccctggtgggtgggagaggtgtactagggcccccagggcttccctctcaggggctggtgcctggggcaggccttccctcagctggcctagcagttcatggccccttgggaagaggttaaaatacagattacagggcctcacctggttgtactgaatcagaatctctggagtgggtgtcgaggggattccagcagtgggatctttaaccagggacatttgggtccagcgatctaagaatcctcctagattcagggcctgaagctttcctcacttgactgacacaggctgggtgcatggcgccccaagcactgacttggccctgaggccttcctggggttgtggaactccaggtgagagtaaagttggaagtgccctgtttgggaggaggtgtgtcccctttgaagccaagcaataaggagggtgaggtgcagggagtgagggctaaaggcttaggctaggacagtcctgggacctacccccagttcctcccggttcgagggctccaagtgtgaggcctgtggccgcagagaccacagcccccacctgccaccgcattgccaaggtgtttactgatgtgacagatgacagtgtagaagggaggggagccggagggaatgccagggacaaatatgacgcccttggcctggccctttgccttcaggacagggctggccacaaacagaagtccattgcctctggttcaagtccatagacaattcctgatgttgggccctggcggcggggggctccagtccccagtggtgccgacgggagtgggcgtgtagctcctgggctgggggaggtggacgtgtacaggcaggagggtgtgggccatgcccaaagctgctcccagctctcacttcaccctcaggcaggagcacttcctcctccctgcttgaatcctgttcctttcatgccacacccactgtgggggtcttcgctgcttgtagacccagtttccctggccctgtggcattgagtctctggcagggctgaggccagctgttttcctagtggagctgaaagagggtggatccgggagggtttagttggccgaatgggtccagtgccgtgtatctgacctgtccctggaccctgcccagtcaccctctctgctcttgccacattgaggcttttctctgtgcctcacgtatctggtctttgaggtagggattaaagacctcttagcaagactttgtgcttagggtaggagttggcggggggttctgaatgtttttcaaaacttaaaaaaattgagctatagggccgggcacggtggctcacgcctgtaatcccagcactttgggaggctgaagagggtggatcacctgaggtcaggagctcgagaccagcttggccaacatggtgaaaccctgtctctactgaaaatataaaaattagctgggtgtggtggtgggtgcctgtaatcccagctacttgagaggctgaggcaggagaatcgcttgaacccgggaggcagaggttgcagtgagccaagatcacgccattgcactccaccttgggcaacaagagcaaaactctgcctcaaaaaaaaaaaattgagctatagtccaggcacagtggctcacgcctgtaatcccagtgctttgggaggccaaggcgaatagatcagttgaggctaggagtttgagaccagcctggccaacatggcgaaatcccgtctctactaaaaatacaaaaattggctgggtgtggtggtacacgcttgtaatcccagctactcgggaggctgaggcaggagaattgcttgaacccaagagacagaggttgccgtgagccaggatcacaccgctgcactccagcctgggcaacagagtgagactgtgtctcacacatacacaaaaaattaagctataattcccgtcccataaaattcactggtaatgttcgaaataaagcttggcaggggctggatacggtggctcacacccgtaatcacagcattttgggaggccgaggcaggtggatcacctgaggtcagagttcgagaccagcctggccaacatgatgaaaccccgtctctactaaaaatacaaaaattagccgggcgtggtggcacgcgcctgtaatcccagttactagggaggctgagacaggagaattgcttgaacccaggaggtggaggttgcagtgagccccagcctgggtgacaatagcgaaactctgtctcaaaaaaaataaaaaataaaaaagcttggcaggaagatttctggctctgggttgtatcctccagctttcccaagagctccctccttgggttcacccttctgcatcagtgttacctttctcttccagatcattcccatggtaatgggttggatgatggccccctgcaaaacgtatgtccatattttaattcccagaacctctgactattcccttatatggccaaaacaaaaaacaaccaaccaaaaccccacaaatactgctttctgtggatcttgagagaaggagcttatttggattatctgggcggcctcttaatgcatttgcactcttagaagataaatctgcagagaaggccgtttgaaggtggaggccacagccaaggaatgaaggatggccaccagaagctggaagaggcaacagatcctcctttggaacctctggcaggagcgtggcccacacctggaagtcagccttctcgccctgcttgttttaagccactaggtttgtggggctttgtcagagcagcaccaggaagccacccatcagtacacgaatatacccctagatcaacgccccttcacttcctcatccactcctttgcctcccccctggcaaactctgccacttgttaccaggatgccactgaattctcctgtcaggtcacccatgcgccatccctcttttggcagaatcgagcagtcacttcccggacctcgttgaacatgttctctcagcagctcctggtgggcactgtgggcccccagctggactcctgctcccctgtaaccactccacacagcagccagacgggatgacttaaaacctaagccacatcataccgttcccctgcttaccacgctgcagagacacagagagtgaaatccctatgccctaccctagcctgaggctgtgcatggtcggccttcaccccccaattctcactcaccacggccaagttatattcccacccatggtctttgcacccccgttcctcacttcacccacctggagaggcttctcagccactgcattggtttaccgccatctctagttatcccattaaaccatgtccttactcagagtctctctgcgcccagtgtgctagccttgtgggcaggggccttacaccccaggatgcagcgcgatgccggcacaggctaggaaagcacattgtggatgaatgcatgagtgactgggtgaaaagggcacatgtcaggctacgtcatgcccggggaacagctggacaggtgggaagggagggtccgagacagcaggtgtacagtgagggcccaagggctctgtgaaacgccagaagaggagctgcccccacaagttctaatgatcggaagacaggaaaaccgtcttctgaaaacatctctcatgggcctaagggacaaaagggtggagaggagtgcagaggtgtccggggactgccaggcagccagcaggggctgtgggccagaggcccaggctgaggccaggggctgcagacacgcgggacgtggcccatgggccctggctcctggtcccatgcacaggccaggagccaccctgttacctgcatcagggcatcacccaagcctgagtgttactttgctgtcatttgtcctccattgttagcacacagtcctcccaactccacttcccaggccatgtagcaaccttaaaaccagcaggtgctgtttataatcctgctggggcctccagctgacataaggggctggttcctggcatgttgattccagaggacacacacatggctaggcaggggccaaggtctgatttggtcagtgaggtcctcaaatgtgtcttggaaccaggtcagaactggggtaattcaatccagaggatacctgaaggccctctcccttcggggagggtagagtcagcctgacctggctggtcatcaggagcacatgggaactggagggcaggggagatggaggtggacttggtgtgcgtgggggtgctgtggacaggttccctctgaaggaggccgggaaggagggcccgctcaagccaccctgggccctgccctgagaccggagcctggagctgctcccagagggcagaggcctcctctgcagaccaggcacagtctgcagcagctctgcatgcctggaggtggcctggtgccctggagcagcacagccagggaaacaccgcctggcctcatgctgtggacattcccactgaattctgaaaaggacagtggctgcctttggttgtctggagaagagggtaaatgaaaaaaaagtcaacattttcccactacagatcacctggctcctttctcggtgaccacgtgcagggcaggacccaatccctgtatctcactcttctcatttgtcagtttattatcacagcatgggtgtacactgcagggacagatatggggaagtgtcctcagctattctggacatagagattttcagtcttgtgaatggcagccattgttcccaagccgtttctgggtgccaggcaccttacatccctaatctcctttgatctttgcgaccgccctatgggagcagatggagttatcttcaccacctcacagataagaagatggaggtgcagaaaattatgtttagcccagggtcacacggaagccgggactgaggcagcctatcttcccaggagcccttaaccatcatgtgagcagctggagggaaggactgcacaccccgaggtcacccccaaacacccccttgatgaggggtcccttctagtggtggatgaataaggacactggcaaattgtgattagattcctttaattattacctggacaaagaagactccagctaacctgtcaaatggacgagtgaggaaagaagctaagccctggccaatgtgaatggaatctcacagcatttgcctgacagctgtgaggctttgtggatctcctcccacctgcaccttcctcggattggggaactgaggcccaacctttccttttgcctcagatttattagtgactccagaattaggctttagccatggttattctctcctaaattattaactcgataggctcttggactccgaggctaaccagctggagacagcgccacgggcagcgggaactcaatggcaaatagcaaatgtatcttcttggacagaattaaagtggagaacagcctgtcccaggcacgggcgggcaggcttccactcagtctaggctgaggggcagggctttttctggagggtggagggttgagtggtgtggtaggtgggaggaaagtgcctgcagagctgggagtgcagggtgcgcaggagcagggggactcctgagctggcctggcaccttgggtgcttcgcacccgtgagtgggcatgggatttgggctgtggtgggggacgggccagggagcaggcagctcgaggagggccttgagcttgctgagggttttggattttgtcctgaaggtgctggtgagtccatgaatgagtcgcatttattatcttctatttttttgagttagaaatcaaccagtgggcatagaagtaaacagtcaaaagtacaaaaaggcccaaaagggaaagcaagagacccccaccagtccctctgccgggggcagcccccagcctgtttctcttggcatttgccccgaggggcgctctgggctgagccctggttttgtgctgccatcttgaagcagaatctgttgactccccactgtgaaccgccaggcccgtggctcatgccagccttctcccctatgccccacttgaatttctgttatgttttgatttttttcctgtggacatttcggcctgtgtttctgtcaagtggtgattatatttgctgactgtcaagaaaaacaaggaagaacgtgtcccccattcctttcccaggtctgctcctggtttctgtgagccgcgctgttactgtgagcgcgctgcctctcaggaagtcttccttgtgaaaggtaactcgtgctgctggaaagaagctgacactgcacagggggaagctgtagagttgtcccctgtcttggatctctgctttcctactttgcctgtcagaggcagccactatttctcatggcttcctctgcacagatggtgtattgaacacatttgcattataccatgacttttatgctgttaaggtttataccatttacatttttttttttttgagacagagtctcgctctgtcgcccaagctggagtgcagtggtgcaatctcacctcactgcaacctccgattcccagattcaagcaattctcctgcctcagcctcccgagtagctgggattacaggcacgtgccaccacgcctggctaacttttgtatttttagtagagacggggtttcaccatattggccaggctggtctcgaactcctgacctcaggtgatccacctgcctcggtctcccaaagtgttgggattacaggtgtgacccactgcgcctggccaggatcctatttttagatgccatccattactcagacattactcaaaattatgtcacattttagcctgcttcaggtttaccatctggaaattagaaagttaaagtaggaagcatgccttcccacatcctcgtgatcacccagcttcttaatcaccctcatgctgagcctcctcacccctttgctatgtgtgccacacagccgctagggcttcctttactgtgcccttggagtggttccagcatttcctgcattccatgttctctttcctctttctaggatttcatatttgttagacacgaggataaactttctgggttcttatatgtcaaaaatgtttttttggcctggtgcaatggctcgcacctgtaatcccagccctttgggaggctgaggcaggaggatcgcttgagcccaggaggttgaggctgcagtgagctgcattcacaccactgcactccatcctgggcaacagagtgagaccctgtctcaaaaaaaattttttatttctcacatatgattggttggttgatagattgtggttcggaagtgttttccctcagatgtctgaaggggttgctgtaacacccagtgttgctcacaaagtctggtgtgtaatgattcttacttgtaacttgtatctctcctctgggaacctttgggatcatttgtttttccttggtgttctgaaattttgtgagactgggtctaaatggtaactcttacttttttttttcattgaggatggcactagtaggtaggtgaaccttgccaatttgaagacttaggtctgtcttcagctctgaaattttcaaagaatacagttgacccttgaacaacttgggtttgaactgtgtgggttcacttaaaatggattttttttcaaccaaacacagattgaaaatacagtatttgcgggttgtgaacccgagtacacagagggccaacttttcctgtagtggggctcttggggccaacttcaggatttgattacatacggattttggagtacttgggtgccctgggacaaatcccctgtgtataccaagtgaaaactgtattttcttaattaattccttatctccatttcctctgttcttttctctgggattctttttttgttttttttgtttttttttttcgagacagagtctcgcttgttggccaggctgcagtgcagtggcacgatctgggctcactggctcactgcaacctccatctcccgggctcaggcaattctcctgcctcaccctcccgagtagctgggactacaggcatgtaccaccaagtccggctgtattttgtattttttagtagagacggggtttcaccatgttggccaggctggtcttgaactcctgacctcaagtgatccactcaccttggcctcccaaagttgtgggaccacaggcgtgagccaccacacctggccgcctctgggattcttttttttttttttttgagatggaatcttgttctgtcacccaggctggagtgcagtggcacaatcttggctcactgcaactttcacctcccgggttcaagtgattctcctgcctcagcctctcgagtagctaggattacaggcgtgcaccaccacacgtggctaattttttgtatttttggtagagatggggtttcaccatattggccaggctggtgtcgaactcctgacctcaagcgatctgcctgcctcggcctccataaatgctgggattacaggcgtgagccacgcctctgggattcttaataggcagatggggacgtcccctcctttcctgatcactgttctctgacagttcccagtgctttctcattctttgtaagagtttcttcgctttttttcctttgttcttctatttttcaatacaattttagcattcatatgtttacttttgatgaagactaagggattttaaattgactttgaaaaacattttttagattcacatggttgagattcctcgtgtggcagagtgtacataacctaaactcttcccctcccccacccgttatcactaggtctctagccacagcttggggagagtgtgggagggggaggggatcaatgccacagctcccaaagcttgcccacaggctgtcttcctcttgacatctgttcttttcttaatcccattctgatccctgctgtttgctagactggagcctctcatcctggccatccatgtttccaatttagggttccatggttcatgctgatgatcctgtccaccttctgtttttagaaactcataaaaatctccggtttgctgatatcatcctctacttctttttttaggatgattatgtgtgtcttttttttttttttttttttttttgagacagttttgctcttactgcccaggctggagtgcaatggtgcagtcttggctcactgcaacctctgcctcctgggttcaagcgattctcttgcctcagcctcccaagtagctgagattacgggcacatgccaccaacgatgcccagctgatttttgtgtttttagtagagacggggtttcaccatgctggtcaggctggtctcaaactcctgacctcaggtgttctactcgcctcggcctcccaaagtactgggattacaggcatgagccaccgcacccggcctgtgtgtctttactgtcattaaaatgtgattttgtgaggagtgataattaggtggaacttggaatgccaaggtacaattttaatctggagtttgatatggtcaggtttgcattgtaaaagtcactggtggacagctgaaggaaggaatggacgggacaagatgatatagggtagccacttggcatccagatgagaaggaaaaaagcatgaccagggcagaggccatggagatggcagcagactctacagatattggagactcgtagaaccacaatttctgcaccagagaaggctgatgtttgatgccagccatggagttcagcagtctggagcagaggagccacaggtaaaatcatataggaaagagtcctgagaaccacagatgggccctggagccacaatcagtgagtgacacctagaaatgtgggtagttagggccaggctgagtggaattgatgtgcgtgagatctgccattgtggagcagtaatgagtcagcatgagtgactggcaagcagatctgatcgatagcacatagtcgtgtgcttctggctggaagacagggcacacgggacaggttcaagaggacttggtgactcagttggatgtggacatgaaggagaagaagactccaggatgactcccagatttccggtcgcctgggtgatgccatcctgaagatgggggctttgggaaggtgttgcctaggttgtgtttaaggtgcctgcaggttgagagacgcagtagtggtcgagtcttggggagtctggggctgctagttcttccacctggctctggacccaactcctgctttatgggagccctggaccgttcattattcctgcacagcagcctcttcccttccccatttaaatgtgttcaaactcctcccacccgtctccgcccaaccttctttggtgtgccacctgttttgcgccagtcccgccacctgcagacttcccaaagcagctttctgtctatgacatcctgatttccactgctgattttagcaccactgctgagtgtttttttttgtttgtttgttttgttttttaaacatagagaactacaaagctttattgaacgacattgtagaaccaggacctgtcaggtacacttcctttttttttttttttcttgagacagagtttcactcttgttgcccaggctggagtacaatggtgcgatcttggtcaccgcaacctctgtctcccaggtttaaacgattctcctgcctcagcctcgcgagtagctgggattacaggcgtgcgccactgcatccggctaattttgtattttcagtagagacagggtttctccatgttggtcaggctggtctcaaactcccaacgtcaggtgatctgcccacctcggccttccaaagtgctgggattgcaggcgtgagccaccacgcccggcccaggtacacttcttaaactctccctccattcacttctcttaggccccatctccacgtctgccccattccagggcagcattctcctatctggtctctccgcatccatccttgttcttttagcccattcttcacatagctgcaatctttctgaaatgaacccctgtgtgcacctccttcctttacccagtgctcccagtgccttaggatgtcatcccagatctctcccttgcccctactccccacctggtctggggcctaggtctgcttctggcctcatccccgtcctctctttccttcgtttctctaccctgacttctcaggacccctctcaattcctgagacttctggagctcaggcctttgcgcatgtgtttccctctgcctgcggtgaccttctctctatctctttgcctgctgattcttccccattttctctgtgcccctgaaaatgacactccctctggggggcacacagggttcttttgcagctctctgcatacttgcagctcttttcttaattatttgtaatttgtttaaggtttgccatcctttctctgttatgagcagggcacatgtctgttgctttctcattatcccctgtgtgttgtccagtcactggcttggcttgtgacatattaagagtcggcagtatacatgtgcatgcaaatgtatgaacatgtgtctctgtgtgtgtataatcgggggtgggattagctctgaaccgatgagcttgttgcctaaagataagaatcccacatcgtgtgtcctgagaggagagataggagaaactgaagaggccaaaaagctagactggcttcactaaaaccagcagggagactttgatggggaatggttagcagtgttacagagggataaaatgcctcctaaatttggcattttcagaagtcatttagcaacctagtcttttaattgcagggattttttaaaaattacaaaatgagtacagtacatatttgtatctgactcatctaacgaagtttgtggtttcagaaataatgagtcattctgaaacagtgtattgtttcacagcttttaagttgcatgactaatacagtgcattactatatacctttcacttacattcacaaattatgaatagtttgctacatttggtttgtctcacacacacatacactggcacaatgatcacattctgattttttttttttttttttttttttgagacagagtcttgctctatcacccaggctggggtgcaatggcgcgatctgagctcacggcaacctccgcctcctgggtccaagtgattctcctgcctcagcctcccgagtagttgggattataggcgcacgccaccatgcctggctaatttttgtatttttagtagagatggggttttgccatgttggccaggctggtcgtgaattcctgacctcaggtgatccactcatcttggcttcccaaagtgttgggattacaggcatgagccactgtgcctagccacatttagaaattgtaataggtgccacagtctatagtcagatgttcccagttatcccaatcatatctttatagttgttcttttttaaaaaatccaggttctattaaaaggtcatgcttgcatttaatatgttcctttaatctgaaagagttcctcagtcttttgtttgttttagtctttcaagacattaacattttcctccgggcacggtggctcacacctgtaatgggagcctgagcaggaggatcatttgaggccagaagttcaagaccagcctgggcaacacagcgaggccccatctctatgaaaattaagaaaattagtcaaatgtggtggcgcatgcctatagtcctagctattcaggaggctgaggtgggaggattgcttgagcccaggagttcaaggttacagtgagctattagattggtgcaaaagtaattgtggttttggccattaaaaaaaggcacaaattgggccgggcgcggtggctcacgcctgtaatcccagcactttgggaggccgaggcgggcggatcacgaggtcaggagatcgagaccatcctggctaacacggtgaaaccccgtctctactaaaaatacaaaaaattagccgggcgtggtagcgggcgcctgtagtcccagctactcgggaggctgaggcaggagaatggcgtgaacccgggaggcggagcttgcagtgagccgagatcgcgccactgcactccagcctgggcgacagagcgagactccgtctcaaaaaaaaaaaaaaaaaaaaaaaaaaggcacaaattggccgggcgcggtggctcatgcctgtaatctcagcactttgggaggcgaaggcaggcagatcatgaggtcaggagatcgagaccatcctggctaacacggtgaaaccccgtctctactaaaaacacacacaaaaaaattagccgggcatggtggtgggtgcctgtagtcccagctactcgggaggctgaggcaggagaatggcgtgagtccaggagacagaggttgcagtgagccgagatcatgccactgcactccagcctgggcgacagagcaagactccgtctcaaaaaaaaaagtctgggcgcagtagctcacgactataatcccagcactttgggaggccgaggcgggcgattcacgagttcaggagattgagaccatcctggctaacatggtgaaaccccgtctctactaaaaatacaaaaaattagccaggcgtggtggcgggtgcctgtagtcccagctactcaggaggctgaggcaggagaatggcgtgaacctgggaggcggagcttgcagtgagccaagatcatgccactgcactccagccttggcaacagagcgagactctgtcaaaaaaaaaaaaaggcaaaagctgctattacttttacttttgcatcaccctaatacaatagtgagtgtaccactgcacttcagcctgggcaacagagtgagaccttttcttggggaaaaaaaaaaaaaattaacatttttgagttcaggtgattttgccaaatgtccctcaatttgagtttggttgtttccttatggttacattcaggttaaacctttttggtggcaatactgtctacatgagtggtgctgcatcctcagtcagtccattaagtaagaaggacacaatgtctgtttctcccattgttggtataaatctgatcacatggtaaaggttgtgtctgccagggttcttcactgtaagggtatgttttccccattgatgattcttgcctgaatgagttactactattgtcttagtccattctatgcttttataacagaataccacagactgcataatttataatgaaaacaaatacattctcacagttacgaaggctgggaagtctgatattaaggtgccagcatctggcgagggccttctggctgcatcatcccatggcagaaagtgagagggtaagagaggtgagagagtgagcaagcaagagagggctgcacttgcatttataacagacccactctcaagataacagacccactcttaagataaaaaacccactcccatgatagtgacattaattcattcctgaggccagagccctcatgacctgatcgcctcttaaaggtcacacctctcagcactgttgcattgcagattaagtttctaacccatgaacttcggggggcacattcaaatcacagcaaccacggtgattataaaatggtaattttcaggccgggtgcagtggctcatggctgtaatcccagcactttgggaggccaaagtgggtggatcacttgaggtcaggagttcaagaccatcctggctaacatggtgaaaccccatctctactaaaattacaaaaattagctgagcatgttggtgggcacctgtaatcccagctactcggaaggctgaggcaggagaattgcttgaacccgggaggcggaggttgcagtgagccaagatcgcgccactgcactccatcctgggcaatagagcaagactgcgtctcaaaacaaaacaagacacaacaacacaaaacaaaacaaaacaaaacaaaattggtaattttcttttttttcctcattccttccacatttatcagtttgcattcttctgtaaagacaagctttagcttctccttgcccttccttattttattaatgtcagtatggacttacagaattttattttcattaaacgagttataatccattcctgttatttatttatttatttttattttttccatttttttgagacagaattacgcgcttgttgcctgggctggagtgcaatggcgcaatctcagctcaccgcaacctctgcctcctaggttcaagagattctgtggcctcagcctcctgagtagctgggattacaggcgccttgccaccacgcatttttagtagagacggggtttcaccgtgttggccaggctggtctcaaactcctgacctcaggcaattcacccgccttggcctcccaaagtgctgggattacaggcatgagccaccgcgcccggcccctgttatttattttgatgcccaaattcagccagtgagagagggcccttacaaggtcacttctgtttgagtgttcctattgtttttgagcactttcttatattttggcatagaaaggtattccaggctcacattgtagtttccagtttgagtactagccattttccaaagagtcttggttccttttagtggagaattatatataaaaaccaagatttgggtagatttgctcagtgctactggagtatccttttttctgggccctagcaataaacagaggtaggaggttttttttaataaaaaatagtgaattacaagaactcttgcttataatacaatgccatctaattaatgaaaaggaatgattgagttaagcaaatcaccatttcacgactgtcatagtaagaactgattcaggcaagaatcatcaataggtgctaaaacttgtaggtgaaagtttgatgaggagtaagatacttacagtccccaaacacgtaccacaagatacctgctaattaaaatgggaaagttatgatggagaaacctggcagacaccacatcaaccaagtgccttctcatgtacccctcttgctggtcgcttgtgtttatggcggctgatgcttttgacagttaatgtcacatctgaggcagtgctccgtaaccccagccttgggagggcactttttggggcagaggacagagtgtcctgttatcttttggtctggttccaggcaggagccctttctctcagggactgcttattttatgggaaggagatcagagtctggagcccagtagctttgggctgtctctgtgtcccatgtgatccatgaaaacagcacatgagaatcaccaggcccaaaggggaactctgggagacctggtcctggcccctaacctcagtctcaactggttgaatcactggtggaccaccttggattgcctcttcttgccataggaagctggttgggagtgctgccaactttcttgaccgcaacctgcattgctcatcttttgttcttaggggactgtgaaggacaaatggcatctctcccagccaccttcacataagacagtgggctcagctcaggcccagccaggtccatcactggaattcagacatgtctgaacttgctggagtagatgagaaccccacaggagccagagcagcccggggccagggcctcctgggaagactcggcctgaaagtaacctttggtgaccacaccttgctatccagtgggcaggcagatgctgtcctttcctcagactggcctgcaggctacagccgtgcccatctgcagagataaggtggtttgccctcaggacgcagatggcagagaggcctgcttcccgttcatataagtaaaatctaatagtatctactttttttattgttgtttttgtgtaagaatggttttatttgttccttaaatgtttggcagaattagtgaaatcatctaggcctaaagttttctttgtgggaaggtttaaaatgatgaattttaggctgggcgctgtgactcacacctgtaatcccagcactttgggaggccaagattggcggatcaccagaggtcaggagttcgagaccagcctggccagcatggtgaaaccctgtctctactaaaaatacaaaaaaattaaccaggtgtggtggcaggcgcctgtaatcccagctactcaggaggctgaggcaggagaatcgcttgaacctgggaggtggaggttgcagtgagccgagatcatgacactgcaccttcattccagtctgggcgacaagagcaagactctgtctcaaaaaaaaaaaaaaaaagaaaagatgaattctacttttttaattgttatagtgctattaaaatttctatttatttttctgttcataaatattaaaaaaaaaaccttttatagtttggtaccataggaaatctgaaaaatagatgaatattaaaaaaaaaaatctggccgggcgcggtggctcacgcctgtaaccccagcactttgggaggccaaggtgggcgaatcacgaggtcaggagatcgagaccatcctggctaacacggtgaaaccccgtctctactaaaaatacaaaaaattagcccgtgtggcagcgggtgcctgtagtcccagctactcaggaggctgaggcaggagaatggcgtgaacccgggaggcggagcttgcagtgagccgagatcgtgccactgcgctccagcctgggcgacggagctagactctgtctcaaaaacaaacaaacaaaatttcatagtttgatcccatgggaaatctgaaaaaatgggaggctgctcagaagctcgtcataacaatatcccctcttatatagatagcctctagtggtttataagctgaagctgaaaccatgttcatgcacttgatgttgatgccttgctttatttagaactcccaagtcccaggtgggtgttcaacatgtttctttgattaagaaggcagggttctgttcccttcttataaactcaggctttctctcaccatttgcttgccaggcagtgttaggtgttttggatacagctgtgagtctgttccatggaggagctcatccttcagtggaaagagacagaaaatgcagttgtgtggtaggtacacgggagaggtgctctgggtggtcatgagctgccctgagagctcaggggcagataagctgctctgcttccatgtgaacttctgtactgtgaattaattcacgcgtggcaggtggccaggggaaggatgttggtataatggagacactgctttggttcacctgtgattttgcctaggcaaaggaggtggaatagtgggaggagaatgacagtgttcagcaggaaaggaaaaagccctctgactgctctgccgcaggagcccctgtgggctcctgggaacaagaaaaaaacagtgcctgcagctggcactcccgtagaaagccacatcctagcctgctggggtcttggccgtggcaggctacgctgcctccaggcccatcttagtaacagccccctggctcagaactcctctttcatctgcactgtcttggcacctgtcagccttgctctaattaaagtttgccaggctttctatttgacttttttggtgcagttttaatatccatggtggcagcctcttgccccactgaactgcctgcctgggtgtcccaaaagattttgttagtgctctagtgacaatgttttgtaggtttgagtggtctgctctagccccatgtttcacagaagtcctgttaatatgtggaataagataacatgaggttttctaagaatgtatatattgctttatagcagaaatgtatgtatttcagaggaatttaaagcttgtgagctagatagactataaacggaagaaacatccctaaaacaaacaggaaacaattttaagaagcggcagtagaactctgtgtgcatttacttagcaatctgcatttctaaagtgctttgtacacattccgtctatgttaaaagcctcagcagcaggttggaggcgggttctggggctagtgtttccgatgggaagctcaggctccatccagcctgtggctggactggccaggctcaatgtcactccccaggtagctgcccttgatctatactaggagcaccttgagagctgggaattgatttctaagcctggtttgagctgagggccacagagccagtgcaggaggagaccctgccccagaaataggccagtgcttgttatgcaggccttggcggttccccgtttccttacgtaacctcagtgttcacgctgtttccttttgttgattccctccgtgtgactgtttttctgtcaatctccttagctaatgagctccttataaggagaatggatggatcagagcacagctccgtacacagtggtggggcatagccatttcccagagtgtggactttcccagaactcccctgttgtgtgggcctgcaaaggctgggattgtttctgccttgtttggaataataaagctgcctgtgtttcctgtgttcacttttcagtcgcctgttattcactctcctacatttggggcggttgtcctgcttccctggcctcactgcagtgctcagtgacctctgcagcagagcagtgactgccacgggctggcgaacggaaggacggaaggacgtggcccatgcccttcaggaatgttttggggagatggacaaacgcatgcagacctgagggtgttcggagcacagggagggaggcagagtctgcagcaaggggtggggccgaggagggagactggcctggggagaggacagaggcccagcaggaagtgggaaaggagagggcgtggcaggtggttaccagagccctcctgagatgccagagtccccaggggttcgttccttccagtgtcctgcccagtgcagggacacctgcttgccttttttttttttttcgagatggagtctcgctctgtcacccaggctggagtgcagtggtgcaatctcactcagttcactgcaacccccgcctcctgggttcaagtaattctcctgcttcagcctcatgaatagctgggatcacaggcatgcgccaacacactcggctaatttttgtatttttagtggagacggcttcaccacgttggccaggctggtctcgaactcctaacttcaggtgatccacccacctcggcctcccaaagtgctgggattacaggcgtgagccaccgcgcccagccaaagggacagattattaaagaagataagaatgggagaaggtggaggatgcaggggccagggcacgtggggaaggacacttcctcagctgtactgttgcactccagcctggacgacagagtgagattccgtctcaaaaaaacaaaacaaaacaaaaaatgatattacaaaggacatagaccagggtgaggtgtgagaaagagcgaggcgtttccatgccctccttgggtgcaccatccttcaggaacctccatgtgtttggctgtcctgtagctctccgtaccttttcgtcgtagcccttttttggattctccattgaatagacatgactcaagcatggacaactgggtggcagtgtgagtggacgaaaaggcatgattcagactgacaggctgaatggggaaactcagcaaagcctatctgttccaatgcttcttggcctctctgtgcggctccttctaggggaggggcaggaccccttctgaaatgcgggtcttatgagtcacaatcaaacaaggtagatcagagaatttctttatggacagctccaagacagaaagacagaggaagatatatttttagttatcatggcctgtcttggggagaagtaacaagggctatgggagttatgtgccaggaactgtggaccaaagccaacacagctgacccttgaacagcacaggtttgaactatgcaggtccacttgtattggatttttttcaaccaaacatgactgaaaatgcagtattcctgggatgtgaaacccacatatacggagggctgctgactgcggaacctcagtatgtgaggactttggcatacatggggatcctgcaaccaaccccctgtgtgtacatacggtgaggtgactatacatacataccataacatcgcagagcacactccgcttcctacagaggttgtgctgaggggtctggttatgtcctccagcatgcctctttttgctgtccttgaggactgcctcccaggagggtggcagaagccccttccttcaagtcttcaagctgctgacctatggctgtgtggtcaggcggaggagggagctggaatttgtgagttgaacatggaagagctgtagattcctatgcaggaaaatggcagtttggggcgaaattggaatcagattagatgaggtctgtgtcctgactgcagtttagcagcagcaggcacatcatgtagcctttctgagccttggcttccacgtctgtaaactgaggatagcagctctcacctcaggaggcgtggtttgatgagatgtgaggggtccacagcccagagctgcccaaatagcaggtgcataggcggtggcagctgtgccatggatgtgtccggacagctgggggagggtgtgcaggcatctgtcaccaaaacttggggtttggttgtgcggttcctcccctgcctcagctgataactttctccatccttctctgaggtaacagcagttctcaaggagatgctggcccatcttctcaccactcaactgtcccactccctgcactggcgctgttcttgtccttccttccactgcagctgaggaagtgtccttccccacatgccctggaccctgcatcctccacctcctcccattcttaccttctttaataatctgtccctttggccgggcgtggaggctcacgcctgtaatcccagcactgtgggaggctgaggtgggcggatcacgaggtcaggagatcgagaccatcctggctaacacagtgaaaacccatctctactaaaaatacaaaaaaagaaatagccgggtgtggtggtgggcgcctgtagtcccagctactcgggaggctgaggcaggagaatcgcttgaaaccaggaggcagaggttgcagtgagctgagacgcgccattgcactgcagccctggcgacagtgtgagactctgtctcaaaataaataaataaaataataataataatctgtccctttttcctgcatcttctctactgatcattttcagcagtgtgcccgcatccaccattctcttgatctttatcccactcttcctttaatcctctctttcaggaaatgcaaatgcgtagggggaaaccctaaggaatcatcctccagtcttcatcttcctgcacctgttgatctgcaagacctgttggttctgcctccacagcgcatatccacttccatcatttttgctgtcaccctggcccaagccgacgttgtctcgagtcaactaccgaaatagtttcctagctgatctctctgcttttcttctggctcccctaaaattcagtctccgtactctggccaggtgacctttatacaacagaaatcagtaccatcccctgcttaaaagtcttccatgggtcccggtgcctatgaactggcccctgcctcatcttgggctcattttcctgcatgaaagcagcacatgttgttctctcggcctggtatgttctacttttcaaatttctcactcctcaacctttagcttctgcctgaaaggcctcctgacatcctgtatccaaggcctccatgtttctcttctcagtgcatccagttcattttggtatagcggaacccgtcgcaattcataacttcgtatttatatgtttacttattttctgtgtttcccattagcttatgttccacaagggcagtgattgtgtttccagtgcctagcagaatgtgtggtacaaatgaaaaactcttcgaatgaactaatgaaccaacagggaagagtggtggtgatggaggtttacagagaaggcagtgaccagctgccccactgatttaattagctgcttttccttatccaagagaaggcatgacagttttgcacatgtgtcggatccagcagctatgagaagttcagatggggtggactccagttgttgttctgaactctagtaggaagccacccctatgaatgagcctctatgtacagggtgctgcaaatataaaatcgctttaaaaaaaagaggcagcataacatagtgcaaggaacacaggcctgtgagtactgatttagcttctggtctttggtttgtgtattagctttgttcttcttttctttgttttcttttcttatttgtgaaataagagagattggactagaaagataaaagtcctctccagtttggctgtgttaacggagtacctcacagtgttatcagcaatcgaaacatttaattatcttttgaaaccagaatatggagctgtgatggttctagggttagtcaggtggttcaaaggtgtcatcaaggacccaggctctactattgtcttctgctttgccatcagctttgtctccaggcttgtcccttatggtcacagtgtggctgctacagctgagggcatcacacccttccacaagagcatcaaaagcagaaaaggatggtcatggggcagagctgtccttatgggtccctctctcttcatcagggagtaaaatctttcctggaggtccctagcagatgtccttgtatgtctcactggccagaaccacttcatgtatccactagaccaatcatgagaatggaagtgccataatttccttatcccaaacataaattcatcccccagagctgacctgttacccgctgtactcgatacagcttagtcctgtgaacaaaggaggagtaagggcaggctgctgcatgggctgcctcatggacctgaagttctgtgattcttaggactccgcctttgggaggcttccttgttatgctgcagggactaattgtgttattcacatctccagtgaggcaatggcagagaacaactgtttttaaggaaggctttacattcctgaatgaggtgggaaacagatgaattcactggccaagacaaattcagtgaaaaaactgagcccagcaggtcttctgtagtataggggcccatgattgagctgcctgttgctaagagggagtagaaaagattagagatcattgtaaattatgaggcaagacctcagctaacttcctcagcaaacgactggttcttctgcctgttcaggctgcaacctcaagtattcctagtaagtagaatctttctttaaagctgcctaataaagtcagataataaatgatgaatgtatttgtaatggccattttttttttttttttttgagatggaatctcactctgtcgcccaggttggagtgcaatggtgtaatgatctcggctcactgcatcctctgcctcccaggttcaggcaattctcctgtctcagccacctgagtagctgggattacaggtgcccaccaccatgcctagctaattttcgtatttttaggagagacggggtttcaccgtgttggccaggctggtctcaaatgcctgacctcaagtgatccgcctgcctcggcctcctgaagtactgggattataggcatgagccaccatgcctggcctgtgatggccatattaagaacatactatgtgctgggaactgtgctaggtcttcgggataccaatacaaagggacaaggtcctagtccttaagaggctgacattccagttgagggataccacaggtatcagataagccagctctatgacaagtgagttatggggcaggagaatgggagtggccacctctacctaagaggtgagcaagaaaggaagtgaccttttaagagcaacagatgctttgtctgatgttgagaatagcatgagccagagggagccattggttaagaatggcaggcactggacgtgtggagccgaggctggggggttctgcggccatgctgggaagtatacgtcttacactgcaggtaaagcaaacaaacacttcccatgggcaagtcttcaggtaatgtcaatcaaattatttcccagttttctcttccagagattacagaaggattttatttcatttacttaatacattacattgattatgttcatttatacattacatatgtattatggaccagttgttaataacaaaatgtgtacctttgctataaaccatggatagactagtgtatagcaaaatgtctaaaagggatattatggcatctgttgctcttataaggtcacttcctttcttggtcacctcttaggcagaggtggccgctcccattctcttgccccataactcacttgtcatagagcctgcttatctgatacatgttgtatctctcaactggatactggtcaaacctcttaaggactaggatcttgtccctttgtattggtatccccagtagtggtttctagtatttttttgttgtttgtttttttgagataaggtcttgctctgtcacccaggctggagtgcagtggtgcaatcacagctcactgcagcctcaacctcctgggctcaagtgatcctgactctcccacttcattctcccgaaatagctggaaccacagatatacaccaccgtgcccggctaagttttgtacttttttgtagagatggagtttcaccatgttgcccaggctggtctccaacttgtgatctaatggcttgaagatgaccaaaaaatttaatatttgctatttcccaatttttatcaactctgctgctagtatttctcagtagacaggggcactgctagactcttgttctccagcagtctgcagaggtattcagaaatgattctgcccatagtcctaggcaaatgtcttgtggtgtttgtgggaagccagaaagatccttgcctggagccacaggtggtgctgactccagtgcttactgcctcaggcctttgttcaagtgtcaccttatccatgatgtcagcctctttaaaactacagtcctgcccatcctgatctttcttactctgctttttcatgtttcataccacatatatctccatactgtttattattatgtttacccctgctagatctgagtctgttaaaatttagtagggatctctgtgtgttctgttcactgatgtatctcaagcacttagaacagggttcctcaacccctgggctgcagactagtactggtccgtggcctgttaggaactgggccacacagcagaaggtgagcaggcaggcgagcattactgcctgagctctgcatcctgtcagatcagcagcattcgattctcataggagctaaccctattgtgaactgtgcacgcaggggatctacgctgtgcgctccttatgagaatctaatgcatcaccccccgcccctggtctgtggaaacattgtcttccatgaagctggtccctggtgccagaaaggttggggaccactgacctagaacaatgccttacagaagacctagactcaaagagcggtacctaggtaggtaggaagtataggaagtcgatcggtttttggaaactgtgacttgaagcaaaatgatgcactgtataacaaagccaattttaccacagttgatactgttaaaagaaaaacttcggctgaattcaatttaaaagagcttaattgagcaaagaatgattcacaaattgtgcagcctgctgagccaaagcaggctcagagactccagtgcagtcacgtggtggaagataatttatggacagaaaaaagaaagtgatggacagaaaaaggaaaagtgacgtacagaaaatggaagtgaggaacagaaacagctggattggttatagctcagcatttgccctttttgaacagggttcgaacagttggccacatttgattggccaaaagtcgaggattggcatgagtgcaggctatagtctgtttacacgtccacttgttgtagtccacgatgtacagagaaacctttaggccaaatttaaaatatgtaaggaggcagctttaggctaaacttgatttaacaatataaacaagagttaacttcctatgacatatacttcaagtcacagtttgagaacccaccgaggacattgaggacttacagtactcccttaaggcttccccacctcttgtcattggccatcctgtgtcactaaacagaaaggagttgctaagtcaagaatgaagatcttactgagttttctagagcaaagctgctcatccctgcttgcatgtctttagtattgagggtaaaggccttagtgccctggaaggtgaactttagaggttgttaaagggtcatggaaaaaagaggaggtggggtcttggattgtggttgcagagcgctataaactgaccgtaacagatggtattcttttaaacaggtataaaagtttggtcacggggacccgagcaagaggggtcattgctgtcctctgggtccttgcctttggcatcggattgactccattcctggggtggaacagtaaagacagtgccaccaacaactgcacagaaccctgggatggaaccacgaatgaaagctgctgccttgtgaagtgtctctttgagaatgtggtccccatgagctacatggtatatttcaatttctttgggtgtgttctgcccccactgcttataatgctggtgatctacattaagatcttcctggtggcctgcaggcagcttcagcgcactgagctgatggaccactcgaggaccaccctccagcgggagatccatgcagccaagtcactggccatgattgtggggatttttgccctgtgctggttacctgtgcatgctgttaactgtgtcactcttttccagccagctcagggtaaaaataagcccaagtgggcaatgaatatggccattcttctgtcacatgccaattcagttgtcaatcccattgtctatgcttaccggaaccgagacttccgctacacttttcacaaaattatctccaggtatcttctctgccaagcagatgtcaagagtgggaatggtcaggctggggtacagcctgctctcggtgtgggcctatgatctaggctctcgcctcttccaggagaagatacaaatccacaagaaacaaagaggacacggctggttttcattgtgaaagatagctacacctcacaaggaaatggactgcctctcttgagcacttccctggagctaccacgtatctagctaatatgtatgtgtcagtagtaggctccaaggattgacaaatatatttatgatctattcagctgcttttactgtgtggattatgccaacagcttgaatggattctaacagactcttttgtttttaaaagtctgccttgtttatggtggaaaattactgaaactattttactgtgaaacagtgtgaactattataatgcaaatactttttaacttagaggcaatggaaaaataaaagttgactgtactaaaaatgtatacttgttgccaggaaggtgacctcaaaaattaaaagtataattattcggccgggcatggtggctcacacctgtaattccagcactttgggaggccaaggcaggcggatcacgaggtcaggagttcaaaaccagcctgtccaatatagtgaaaccccgtccctactaaaaaatacaaaaattagctgggtatgtggcatgtgccagctactcaggagactgaggcaggagaatcatgtgaacttgggaggcggaggctgcagtgagcccagatggcatcactgtactccagcctgggtgacagagtgagactctgtctcagaaaaaaaaaaaaaaaaaaaaaaaaaaaaaaaatatatatatatatatatatatatatatatatatatatatataaataaagtattcaatcaagaaactgctgtattaatttagggaaatgattgattgatagtctcataagtcaaattttcatcacataattttaagctccattcttttccatatacagaaaactacccgtggggaagaaactggtgaaatgggatccctcctctaccaaattctgccttctagagctagatagatagatagggaattttgcttctctccaaatttcaagtttggttaagttcttggaactcaaagtgtgaaaattttatgaagtaaaattatttaactctgtgtatattaggttaaataaaaataaaacttaaaaagacaagcttagggtgctgcattggcttgttgcatctaccttctaaactttaccctgaaggctgctggaaaaaaagtaagttatgctgagtccaagtttcctgagtagcagaaaagtattgataaattttatctgttgcactttttaacaaaacaaaaagcatctgccaaccacagaacattgcaacacctaggccctgggctttcccccagcattcattcactagcacctcatgttttgggggcacaagcacagggctttcttaggctgtaaaatcacctatatcatctgtctgtccactgcttcaactccttctgcagtatccctgcaacaatattacatgcttatgaaatgctgcagacagggaattcctgtccttctaggatcctcttctggctgtgggcagctttaccataagttcttgtcttcttatgctgaaattgatttcattttcatcttcacgtattattgcttctttgctctctcggtgtccaactgagtctcatcgctctcccttctaatactccttctgtcatctattttgtcttttcttcttcagactgaaaatccctggtagtacctgtagtttccttccaggacacgatttttagtctgttccttcaattgccctgttgtaaagatcagaagtgcagagtgaaaccagttcttcccttgttctcgatactaactctcaaacaatacagtctacttaagctgttttggcacaagcatcacagatatttgaagcttacagaaaccagaacctctaagtcttttcatacctgctactgtttagccacatctctgctctgatcttctgttgctgctcaatagtttcctggacccaaggaaaagaactgacctactcgtcgaaacttcatcttactgtttggcccaccattccaaccttttaaaaattactagtaattcagttagttacttaagactaaatagggtcaggcgcagtggctcatgcatgtaattccagcactttgggaggtcgaggcgggcagaccactaggtcaggagatggagaccatcctggctaacacggtgaaaccccatctctactaaaaaaaaaatacaaaaatttagccgggcatggtggcgggtacctgtagtcccagctactcgggaggctgaggcaggagaatggcgtgaacccgggaggcggagcttgcagtgagctgagatcacgccactgcaccccagcctgggcgacaaagtgagactccatctcaaaagaaaaaaaaaaagactaaataatgtggacacaacatgatattaggctttatttgaatttaaaatcttgattccatccagggacattttttaccgaagcgtctcagagactggctcagggtatttcttgacaagactgtacagggcttctcatcatacacaaaccctccacagcccacggctccaacccacagcacctcctgcagtcctggagggaaaagggacagtaacatgaagtgtctgaagatccatttcacctcttttccatgtgaatcatgacgctttcaatgcatttcttgacaggattctattttgaaagaatgatgctcaatctgtaccttttatgcttcttgtttcttctccatcaataatatgtcagtcaactgcttgtcagagacacttagctgctgacaggtcctcataacctgactcaggtaaactgccaagagatgcttgcactggaatataaaacacacacacctattagaaacaggcagggccagggctggccagtctaaccaagatttctcattaccatcttatttggcaggagaagactagagcatacagattacggggtctctaactgattgtctaaaaagtgcagatgggccgggcatggtggctcacacctgtcatcccagcactttgggaggctgaggcggatggatcacttgagatcaggagttcgagaccagtctggctgatatggcaaaaccctgtctccactaaaaatacaaaaattagctgggtgtggcggtacatgcctgtaattccagctactcaggaggctgagccatgagaatcgcttgaacccaggaggtggaggttgcagtgagccgagatcacgccactgcactacagcctgggtgacagagccagactgtctcaaaaaataaataaataaaaactgcagataaagatgatgagacaggagtattctctttagaaatcagagtggacacagacttactttgcctgctgctttgggaaatggcttagatccatcaggcacaaggtatgtaacccatggtgaaaacccagactacctgcactcctcacgttagtcctaagttatatttcttccttgccttcagaaagctgtcacagcaatggttaacattccttgaggcactaggctgtgaagtgcttctcatagattatctcactgaaatctgacagctccctaggaagacaggtattgtaaccacatgctcatcagagtctctaggctactctctcttttttttttttttaattttaattttaatttttgttttatttatttatttatttatttttattgatcattcttgggtgtttctcacagagggggatttggcagggtcataggacaatagtggagggaaggtcagcagataaacaagtgaacaaaggtctctggttttcctaggcagaggaccctgcggccttccgcagtgtttgtgtccctgggtacttgagattagggagtggtgatgactcttaacgagcatgctgccttcaagcatctgtttatcaaagcacatcttgcaccgcccttaatccatttaaccctgagtggacacagcacatgtttcagagagcacagggttgggggtaaggtcacagatcaacaggatcccaaggcagaagaatttttcttagtacagaacaaaatggaaagtctcccatgtctacttctttccacacagacacagcaaccatccaatttctcaatcttttccctacctttccctgctttctattccacaaaaccgccattgtcatcatggcccgctctcaatgagctgttgggtacacctcccagacggggtggtggccgggcagaggggctcctcacttcccagtaggggtggccgggcagaggcgcccctcacctcccggacgaggcggctggccaggcggggggctgacccccccacctccctcccggacggggcggctggctgggcggaggactgaccccccccacctccctcccgaatggggcggctggccgggcagaggggctcctcacttcccagtaggggcggctgggcagaggcgcccctcacctcccggatggggcggctggccgggcggggggctgacccccccacctccctcccggacggggggctgacccccccacctccctcccggacggggcggctggccgggcggggggctgacccccccacctccctcccggacggggggctgaaccccccacctccctcccggacggggcggctggccgggcagaggggctcctcacttcccagtaggggcagccgggcagaggtgcccctcatctcccggacgaggcggctggccgggcggggggctgacccccccacctccctcccggacggggcggctggccgggcagaggggctcctcacttcccagtaggggcggccgggcagaggcgcccctcacctcccggacgaggcggctggtctaggctactctcttaactactgtgttatacttctggggttggggggcggggagtagtggcaaaactcttgcatatattggcctgtacacacctctggggagatgattgcgttgaatctgatgtcagagaacacagctttagatcttgaaggggttttggttcaatcctgtctcttgcagttgagatacacttagggcacatcagttacgaatgtggcctcttggacaatgctatacccaacttgccagccaggtcccaagatgtttaagaagttaacagtgtaaaagaaagggaaagaatggagtggacatcattattttcttctttcgcaagacttagaaaacagctgcctgctttcaggaaggtagtgttttttcctttggaataaggtgtgtgtgagtatgtcctgtttctgcttcatggtctggactctgatgaaattggcaaaggcttaaaggaataggtgaaggtactcatgccccatgtgaaggtcaagtgtggtgtcaggctgtctcacaggtagtgcaaagatataccacatggctgaaagtaggatatgcaaagttgtcaacatcgaatttagttcatatttttatggggccatctaattccccagtgcccacttctgggattccctttttttccttctcaaagcttcactcatgatcttttacataaaaattcaggaaattgatgcagttctaaaaatgacattgcattttgagaggctaaacccctaagaggtgactaactgaagacaaagacaaaaaactaccatttgtttcaacatataataagattcccattttgtagaatagttaaaccacaaagtaagggcaatttctctctacattcaactacagtgggaagagtcttccccatcctcaccaggatgctgtcactcttccgtagcactgagaatgcaaatgcaggacatgaacagtaatgacaagaagccaaacatgtgtatgttttactggaacttccaaggacctacaaagaaaggatagatgggatcagacctcagatgtgctggaaaaaccacctctttccctttttatttatgtagactcagagttgctctgcaaattgcaccgagaagaactgcagtaatgttttacataaaagaggaaacaacttctcttcctccagtgtacagactctcccttcctcacctctcagtgctcacctttaggacagcatataaaggaactgaagagtttcagattagttcaaccaaccacataaaccattctgttcctacgcctagtgattcatggggcccactctatgggctgactgtaataagaaggaagtggggggggggaatctctcatctacattttattgtgggggttcttaacctttggtatttcacagcaggtgtataaatttctaaagcttcctacatacctaaagagagagtaaaaacaggcaaagggtcagtagcagggcaggagtaagataagtctcaggccgggtgtggtggctcaaagcctgtaatcccagcactttgggaggtcgaggtgggaggatcacttgaccccccccagagttcaagaccagcatgggcaacatggtgagacctcgtttctatagaaaaaaaaatttttttaaagtcaggtatggtggcacatgccagtagtcccagctactcaggaggctgagaagggaggactgcttgagcctgggaggtcaaggctgcagtgagctgtgactgcaccactgcactgcagcctgggtgacaaagatcccatctctaaaataaagataggtcacagaagaacaaaagaagaaactgggaagaggcttttgaaaagcatttgagagcagagagaataaataaagcaaagacccttgcgaaaggaatgactcagctgttcaggatggaggtctcaggaaaagaggcaggcccagatctgcctactcatctagcaggatggaaggaggacactgatacatagtgggttgataagaggcacagtctaacagtcttggtggtggtcaagagggacaaaaaggagaggtacaggagaaacaagacacatctgtagtatgatcgcacaaatttgctggagaaatcctttgtttaagtctctctaccaccaagcagccaaaaactttttgttgaggtcttcattcctagagttaacttcccacctggaggcgtaagattattattagtatctgagggaagcagaaatgtcctgagggtgattttataatgaactgccacttaggaatttgccacacagccttcaaagcacttttaggctctcagatggcaatctaaatgaaaaagcaaggacttttaaattttttttgaattacaatgttagcactcctaggattctttaatctttcttacccacagagaataaagctacaggtatggtttgactgcaagaacaaacagcaggttccactgctgtgcttttgtcacattttcagtggttcatataatgcagttatcccagtacagcttttattaacatttttttttaatttttgttttttggagacaggatgttgttctgtcatccaggctggagtacagtggcagatcatagctcattgcagtcttgaatccctcggctaaagtgatcctcccacttcagtctcctgaggaggtaggagtactggtgtgcgccaccaccctatgctaattttaaaattttttttgtagagatggggtcttgctatgttgtccaggctggtctttaactgctgggcttaagtgatcctcccaccttggcctcccaaagcactgggattacaggcatgagctaccacacccagcctcagtatggttttttgacgcagtcagaattcctcgggagattttaggttaccagaaatagccaatgattgggtaagaagatgcctactgaacacattcaagatttcagttcaggccgggcatagtggctcacgtctgtaatcccagcactttgggaggctgaggcgggtggatcatgaggtcaggagttcaagaccagcctggtcaatatggtgaaaccccatctctactaaaaatacaaaaattagccaggtgtggtggcgggtgcctgtaatcccagctactcaggaggctgaggcaggagaatcacttgaacccgggagacagaggtggcagtgggccaagactgcatcactgtactccagcctgggtgacagggcaagactctgtctcaaaaaaaaaaaaaaaaaaaaaaaagatttccacccagttacaaattaggtgttgaaaaagcacaccttgcatattacctactgcaaggctctgatgtgttatgaacatatcaccgagaccattcagtatcaatggagagatttccccagcatgtgtggaagcttacactgaaggaagagcattaaagcagattgttttctacttaatcctaaagaaaaaacccacaacatccagcagtgacatgtataattcttttttttgagacagagtttcattttgttgcccaggctggagtgcaatgatgcaatcttggctcactgcaacctccacctcctgggttcaagccattctcctgcctcagccgcctgattagctgggattacaggcatgtgccaccatgcctggctaacttttgtatttttagtagagatggggttttgccatgttggccaggctggtcttgaactcctgacctgaggtgatccacccgcctcagcctcccaaactgctaggattccaagcatgaaccaccactcccggcctataattcttgggtgtctaaactattaccaatgaatacaactttaggtttcttctccctttagttatctcgtctcttctctctagatttaaacttaagcaagcagaagcctctgggattctgtactgactagaataattcactgcttccttcttattgcgagtccccgtccatcataatcctccctggatcatgctgaataaacagctggtgacttgagatggggagaaattctacagagtttccttgcctgagcctttcaagggctaagactcaaaatgttcaactgcctaaagcaataaacaccaaaagaggttaaatttcgaatttgcttttcgcttatctagcagtggacaactaatgaacccaacaatcaggcaaaatctgagttagaaacatttagaactggaaattgaccttaaggataacataattcaattccttcacccttcagtgaaaaaacaacttcctcttacaggaattgctcctagttttcccgcttatagtctggaatgtttatccccagaaggagagagctttttaaaaaaggaacatgctggaaagaggatactcagaccatggctgacagaacttgtaggaacctcacttggaggtggtttctactgtggttctactgtggtttcagttaggtcgcaaggagaggtgacccatctacatggtcatccattcatgggtacagttttattttatgaccgctccaagcctcttaggacactccacagtgtctttgttattgttccttgtgtttggtgcttctctctgaaaacaggattatacattcctggcctgttaaatacaggctggccatgtgacctgctttagtaaaatctgagtagccaagcgaaaaatgttaaaaattgtgtaccatgttttcctttttctctttgagattcacagtgttccagatatgggctgctttgcccactgggatccctgcatgaagctgttttggaacagagctacagctggctcctggtggatacacagcatgaatgagatctaaaactttgtttttgtaagcctttcagatttggggtcattgataccacagcataacttagcctctcctgactgaaacatcctccttattaagtgaatcaaaaaagtataaaaagtggccaggagtgcaggctcacgcctgtaatcccagcactttggaaagcaaaggtggtggatcacctgaggtcaggagtttgagaccagcctggacaacatggtgaaaccccatctctactaaaaatacaaaaactagccaggcgtggtggtacacacctgtaatcccagctactcaggaggctgaggcagaagaatcacttgaacccaggaggcagaggttgcagtgagctaagatcatgccaatgcactccagcctgggcaacagagcgagactctgccttaaaaaaaaaaaaaaaaaattatagaaaacaactcaggtgtcagcaacataacaatgactttagaattatttcacattacatctggagaacaataatattagagttgacctatgggatgaagaatgacctatgaaaagataactagctgggcactaaggcagtatgtgactcaacttttatcatctcatacaactcctgaattcagccaaattcttactatattaccatacaatgcaaccattaaggttaatttgagggtgtataagatttctacagcctcatttaattcaaagtccaagatgacagccacaattcttggaagttagtattttataattaataaagcaatgtaatatataccagatgtgaacgacaaaaactaaaccagtgacttaagttactgttgaccaatgggaggaacaaaaagtcaacagtaattaaactatttcaaacaaaagtctacttgccaggtcaagtattgtgcccataatggaatcaagaccaaatatcccaaactaaaagcaatgggaaaaacttgaaggtccctctagtttcgggtattttagctacctaaaaaccaaaaataaaaacaccaggaaagaggacagacacacctcctcaggtacaaactgcaagttcagtgactttgattattcctaagttctccatgagaaaattcatctaataattggcagtctcttttgagtaggacaataccatccaagtttttttttgtgtttttgtttgtttgtttgttttgagacagagttctgctcgtcactcaggctggagtgcaatggtgcgatctccgctcactgcaacctccttctcctgggttcaagcaattcttctgcctcaacctcccgagtagctggaattacaggcacctgccaccacacccagctaatttttgtatttttagtagacacggggtttcaccacgttggccaggctggtcttgaactcctgacctcaggtgatccacctgcctcggcctcccaaagtgctgggattacaggcgtgagccaccacgcctggccatcttattttagttacaaaaatttctggaggattttgttaagtgaaactatgctaagtgaaataagccaggtacagaatgacaaataccacatgatctcacttatatgtggaatctaaaaaaagttgaactcataggctgggtgcaatggctcatgcctgtaatcctagcactttgggaggctgaagggggaggactgcttgaggccaggagttcaagaccagcttgggcaacatagcaagaccctgtctttatttaaaacaaaaaaaaaagttgaactcatagaaaaagaaatagtggttaccaggggccttggggtgggggaggaagaggaagataaggagatattggtcaaagggtacaaaatttcagttaggagaaataagttcagggtatctatggtacaacatggtgaatatatttaataacaaagtattggcggggatggtgctcatacctgtaatcccaatattgtgagaggccaaggtgggaggatcgcttgaacctaggagtttgagaccagcctgggcaacatagtgagaccctgtctctataaaaaccaagaaaaagactgaagtactgtatatttgaagattgctaagataatggattttaagtgatctcaccacaaaaaaagaagtatataaggtattagatatgttaattagcttgatttagttattctacaaggtatccatatatcaaaacatcatgttatataccatgaatatagacagtttctgtcagttaaaagtaaataaaaattttaaaaaattatcaattcgttaattttaccaagttggggcaaaagccttttaacagtccaggaaatatttaaagctagtcaacagcttctacagagatgaagaacattttgtcctaaggggtttctgtagggatcacccccatctctagacttctacctggtaaacacgccttccactgggtgatgagattaaggtgatggactgtcgatcaactaggtccaaggcctgggtggctgatgagccaaagagaaacttcagcctgtgaaataaaaacacttcagattagaaggcctgattctcaaagtcacctcagtaacttgcccaaaggatcactagacttagtattttttaaaaattcattttaattttgaaaaaaggaaaataatacagcaaaacccatggacccattcactccccagaattaatgttaatatcttgtgtacttatttcagatcttcttgtattatgtatatatgtgtgtgtgtatatatatttatttattattattattattttttgagatggagtttttcttttgctgcccaggctggagtgcaatggcgcaatcttggctcaccgtaacctctgcctcccgagttcaagcgattctcctgcctcagcctcccaagtagctgggattgcaggcatgtgccaccacacccggctaattttgtatttttagtagaaacagggtttctccatgttggtcaggctgctctcaaactccagacctcaggtgatccacctgcctcggcctcccaaagtgctgggattacaggtgtgagccactgcgcctggcctgtattatatttttaataaagggagtaaactgttagtgataaagaagccctctttatacttctctgtagtgcatccttcttcctaccttccccttatccctgaggcaagcacatgcatttgttggtttccttcctgttaatgtgttcatattaaatattatatatagaacatatgtatgcacacatacataacaaacacacgtgcatagatgtatgcatatacatatatagtattgttttaaaacataaaaggtatattgtaggcttctttttgctgttcctgaaatagctcatgaaaaataaaagaaaatataaaatatcgtagacttcttttggcaacttgcatttttttactcaatgcatttttgaaaatgaggcatgttgacggacatttatttttactttacctttgaataatattccattatatgtatacactgaattttatttaagtactctatgtatggacattgtttccattttatactattataaataatattcaattatccccatacatgtcccttggcatacatctctgaaaatccccctttagtttatgtaactaaagcatatgttcattttcaactttaatagatattgccaatagctctccaaagtggaaacaggagtggtggctcatgcctgtaatcccagcattttggaaggctgaggcaagaggatcacttgagtccaggagttcaagaccagcctgagcaatgtagtgacaccccatctctaaagaaaaaagaaaaaaaaaaactaaaacacacaaaaaagtgaaaacagcactcccaccagcactgtataagacttctattttctcaggccgggcgcggtggctcatacctgtaatcctagcactttgggaggccgaggcaggcagatcaccagaggtcaggagatcgagaccatcctggctaacatggtgaaaccccgtctctactaaaaatacaaaaaattagccgggcgtggtggcacacgcctgtagtcccagctactcaggaggctgaggcaggagaatcgcttgaatccgggaggtggaggttgcggtgagccaagatcgcgccactacactctggcccaggtaacagggagactccgtctcaaaaaaaaaataaatgaaacaaacaaacagaaaaaccaacttctactttctccatgtccccactaacaccagtattatcaggcttttttatgttgcccatctgaagataataaatgtgtactttttggattagtaataaggctatccaactgttaaatgatatacaggaaaaaactttgatatgtgagaaaattcttataatattaggtgagaaaggttgaagacaaaattatattttaggaactctcaagcatgttaacttttttaaaggaaacctacaattatgtcaaaattaaaagtttaattttttttttttttgagatggagtctcactctggtgtccaggctggagagcagtggcacaatctcggctcactgcaacttctgcctccggggttcaagagattctccggcccagcctcctgagtagctgggattataggtgcaggccaccatgcccaggtaatttttgtattttttagtagagatgggcttttgccatgttggtcagggtggtcttgaactcctgacctgaggtgatccccccgccttggcctctcaaagtgctggggttacaggtgtgagccagcgtgtctggcctttttgtttgtttgttttttgttttttgagacaaagtctctctctgtcacccaggcaggctggattccagtggtgcaatcatggctcactgcagcctgaaccccctgggctcaagtgatcctcccaccacctcagcctccctagcagccgggactacaggtatataccaccacatccagttaattttttgattttgtggagacagggtctccctgtgctgcctaagctggtctcaaactcccagccccaagcgatcctcatattacaggcgtgatccaccatgcctggccaaaatttaattttttgaaaaggcaataaaccggccaggcgcggtggctcacacctgtaatcccagcactttgggaggccgaggaaggtggctcacgaggtcagcagatcgagaccatcctggctaacacggtgaaaccccgtctctactaaaaatacaaaaaattagctgggcacggtagcaggcacctgtagtcccagctacttgggagaccgaggcaggagaatggtgtgaacccgggaggcggagcttgcagtgagccgggatcgcgccactgcactctagcctgggtgacagagcgaaactctgtctcaaaaaaaaaaaaaaaaaagcaataaaccaaaatttaagagtgattattactgggtggtatgattattgatgctttttataggttttattttccaataaaagttttttataagtgtgggttattattattattattattattactgagttggagtctcactgtgttgcccaggttggagtgcagtggcacgacctctgctcactgcaacctccacctcccagattcaagtgattctcctgctttagcctcccgagtagctgggattacaggcgcatcccacctcccaaggtgctgggattacaggcatgagctaccacacccggcctaagtgtgggttatttttataaactagaaaataaaatggcagggttaaactcaaactgaaaagttaatgttttaaagaacttatatgacttaacacagagtaagacaaacctagtaaggcttcaaaattaaaatgttcaacttcttacttcattttccaacaaaccagccacatatacaacaaattattgggggaaatagaaaagagtgctttgaatttttatattaaacatatgaagatttagtctataaaataacaaaatacaaaaaacaatgaaataaaatttgtcgggaaccttaccaatcaatctcaacagttacctttaagaatttttttaaggccaggtgtggtggctcatgcctgtaatcccagcaccttgggaggccaaggcaggcggaactcctgacctcatcatccacctgcctcggtgtgtgccacctgtagtcccagctactcaggaggctgaggcaggagaatcactggaacctgggaggcagaggctgcagtgagttgagatcgcgccactgtactccagcctcagtgacagagtgagacactgtctgaaaaaaaaaagaatttttttaacctgctctgtccactttaatacctactgtgaacatctcttgaatgcattaaaaatttttccatatcacttttaatggttacaaataattctactgtaaagatgaatcatttttattctcctcaaactccatgaattgttagattgtttctatgttttattgctaccataaacaatactggatattcatcacactgagaatatcctcactgtaaaatctttacaaacatctataattacttcctgggtatatgttcttttatgtggaatttctgggtcaaagaatatgtatgttttaaagttcctattgcctgttaccctgcaatttacattcctgttataaatgacccctttccccatatttgtgtcaacttcttttctgtggtcactaattttctagatgaaaagttatgttatgttaatttgtatttttgtggtcactagtaagatttgtctttttcctcccaaaggattcggctatttacatcttttattctttgcccttttgtttttaaagtagtacatttttttccagtaatatttaattcttattaaaaatttaagaaatacagtaaaggttaaggccgttccctcaattctacctccttccttgccccaaagaaaaaacactggtagagcttggtatatattcttcagaacttttatttttttagagacaaggtctcacatcacccaggctggagtgtagtggcacaatcatagctcactgcagcctggaacttcagggctcaaacagtcctcctgggacaggttttgtttttttttgtttgttttgttttgttttgttttttttttgagacagagtcttgcctctgtcacccaggctggagtgcaatggcatgatctcagctcactgcaacctctgtctcctgggttcaagcgattctcctgcctcagccccccgaatagctgggattacaggtgcctgccaccatgcccggctaatttttgtatttttagtagagacggggtttcaccatgttggtcaggctggtctcgaactcctgacctcaggtgatccacccgcctcagcctcccaaagcgttgggattacaggcgtgagccaccgcacctggccaggatttttaaatgtaagtgtgtatcagtaattaagtattacttatacctaggtagcttttacttttttggtctctgcatttttaaaataactgaccactctatattattctcatttaagtagttgtatcaactgcaaataatgataattgtctttccttgcagataggtacatttgtaatttctttttcatgtgttagttgaacagctacgctttttttttttttttttgagatagagtttcgcttttattgcccaggctggagtgcaatggcatgatcttggctcacagcaacctctgcctcccaggttcaagcaattctcctgactcagcctcccgaatagctgggattacaggaatgcaccaccatgcttggctaattttgtatttttaatagtgacagggtttctccatgttggtcaggctggtcttgtattcctgacctcaggtgattcgcccgtctcggcctcccaaaatgctgcgattacaggcgtgagccattgcgcccggccaacagccacaatttttaaaacaatgttaaataagagtggcaaatatgacaatactggatatggtgttggctattcaattgagacaaatttttaagaatcatgtcaagaaaatattattcctagtttctaagagtattttttattttttattttttttgagatggaattttgctcgttacttaggctggagtgcaatggcacaatcgcagcgagatatgcaaccacaacctcccgggttcaagcaattctcctgccttagcctcccaagtagctgagattacaggtgtgtgccaccacatcccactacttttgtatttttagtagagacagggtttcaccatgttggtcaggctggtcttgaactcctgacctcaagtgatccacccacctcagtctctcaaagtgctgggattgcaggtgtgagccacggtgcctggccttttattctatttttaaaattattttcgtagagatggggggtctccctattttgctagagctggtctcgaactcctgggctcaagcaatcctcctgcctttgcctcccaaagtgctgagattacatgtgtgagtcacagtgcctggtagtaagaatatttttattttttattttatttatttatttatttatttatttatttatttttgagacagagtctcactctgtccccaggctgaagtgcagtggcatgatcttggctcactgcaacctccacctcccaggttcaagtgattctcctgccttagcctcctgagtagctgggactacaggtgcccaccaccacgtccagctaattttttgtattttcagtagagatggggtttcaccatgttggccaggatggtcttgatctcctgacttcatgatccactcaccttggcctcccaaagtgctgggattataggcgtgagccactgcgcccggtcaagagtatttttaaaaatcaagagttgatgttgaaaggattttaacattaatggttaaaaaaaaatcaaatacaacagtatatgtacttacgataacagatattcatcaggaactgtaaaatgagaatggaaaaaaaaagttaatcatattaagcagtgaccattgacataaaaatcttaaaaaacactgtaactaaaaacacttccgtgtgtgatggtcaactgaacctatgcatctggttttactccttccccaaaccccactaaaaccataataaaaggatttcctttttctttttttgagacggagtcttgtcctgtcacccaggctggagtgcaatggtgcaatctcagctcactgcaacctccgcctcccgggtttaaaccattctcttgcctcagcctcccaggtagctgggactacaggcatgcactaccatgcccagctaattttttttggtatgtttagtagagatggggtttcaccatgctggccatgctggtcttgaactcctcacctcaagtgatccactggccttggcctcccaaagtgctgggattatagacatgagccaccgtgcccggccagatttgtttttaaaagtatgaattccaaaggatgagaaagacagggagaaacaacagccatgatacattggaagctgatagaagagtggaaaatgatttataagacctaagaaaactgaatcctaggccagcaatggggagagtcaagcaccagcctgagttacactccaaaatccacctctccccttccccaaaccctaacgaattggtggcaccaaatagcttcattaggggtgaaacagggatatgaaaataagactcttttcgagtacgtttgagaagtagtgggaccccagttccctccacagctttaggtgactgcctttccctcattctggcaagagactaggtttattttctggagaggttcaaacacaggctatttggactagggaaaaatactaggtacagtgaaagtcagggtgtcacactgaaaacaggatctcctgctctcttccctaacatggctcccataacacaagcaatcaggccttcacacttcagccaggagactggaagtcttccctaggtataccccaagagaagtgggaatgacactgaaatggtttccccaactaaatagcctactgagaacaactatagtgacgttcatattccgtaagcccctctaccacccagagcttccaatatactttttagtcttccactctgaaatatgactagacagccaagggttaccagacaacaaaggaaaaaggaaatagaataaaacaaacagaagaaagttagaggaaaaactgcagaaaggagaaaattttaaacatctattactaatattttatcatcagaaaaaagttaatgcaatcataaaacaggcacaaaaacaggcagaaggcataataagaagaaaaagggaatcttctgaaaaaaagttataaattaaaaatacatggtatgtctctgtagtttcagttacttgggaagctgaggcaggaagattgcttgaaaccaggagtctgaggccagcctgggcaacacagtaagaccccgtctctcttttttttttttttgagacggagtttcgctcttgttgcccaggctggagtacaatgacgcaatctcggcttaccgcaacctccacttcccgggttcaagcaattctcctgcctcagcctacagagtagctgggattacaggcatgcaccaccacgcccagctaatttttttagtagagacggggtttctccatgttgatcaggctggtctcgaactcccgacttcagatgatctgcccaccttggcctcccaaagtgctgggattacaggcatgagccactgtggccggcaagaccctgtctcttaaaaaaaaaaaaaaaaaaaaaagacagcagaaattcaacagaaaatctggaagataaagttcaagaaagttcccaggaagtagagaaaatataaaagcaacacagaagccacagtaagtcaaccagaaggacaacagaggacatccagtaacttaattacagaaataccggaaagaacagagaaaacagatggagggaattcatcaatcaaataattcaaaattccccacagctgaaggacatgaatttctagcttgaaagggcccactgtgtgcccacactgtgaagtgaaaaaaaaaaaactttatcagaagattcagaacactggttatgaagaaaacataattcaaacttccagagaaaaaaaaggtcacatacaaaaatcaggagtaacactagaagctaagatgtagtggaaaaatgttttcagatgtctgaagaaatattatttccaacaaataattcaatacctagacaaacaatcacttaagtgtaagggcagaaaaagaactttttcagccgggcgcgatggtcagcctgactaacatttagtatctctactaaaaatagaaaaactattagccgggcatggtggcgcatgcctgtaatcccagctactcgagagactgaggcaggagaatcccttgaacccaggaggcagagggtgcggtgagcagagattgcaccattgcactccagcctgggcaacaagagcgaaactccgtctcaaaaaaaacccaaaaaaacaaaaaaaccccacaactttttcagacataagcctcaaacaggggccggtgtgggggctcacaactataatcccagcactttgggaggccaaggcagaaggatcgcctgagcccaggagttccagagtagcctgggcaacaaaggaagacccgtctctacagaaaataaaataatcagctgggcatgaggtgtgattgcgcaactgtactctagcctggggaacagagtgagacccggtctcaaaaaatagaaaagaaagcctcaaaaggtacatctcatgcccccttcttcaggaagctggcagagtctgtgtgccataatataaggtagtaagcctgggcaacacagtgaaaccccgtctctacaaacaatacaaaaactagctgggcatggtggtgcacacctgtggtaccagttactcaggaggctgagacaagaggatctcttgagcctgggaggttgagggagcagtgacctatgattgtgccactgcactccagcctgggtgacagagcaagaccttgtctcgaaaaaaaaaaaaaaaattttacatgggccgggtgcggtggctcatgcctgtaatcctggcactttgggaagccaaggcaggtggacctcttgagctccagacttcgagtccagcctaggcaacatagtgagaccttgtctctacaaaaaatacaaaaaactagccagctgtggtattgtgtgcctgcagtcccagatactcacttgggaggctgaggtgggaggatcatctgagcctaggaggtcaaagctacagtgagctttgatcatgctattgcacatcagcctgggtgacagactgtctcaaaaaaaaaaaaaagaggtagtaaactgagaaaaagaaaactgtaggatatactaaacataggacccaacaaagatacagagaattcccagataataatggttaagagagatctcagcaaacagccgagagatcagccagtccatattaagcaagtccgaaggctctagagatgtcttcaggaaggtgaaactgataacatacttcgttcatctgaacatcttgaggggagattgagaacactagtaaaggatgtgaggttaaagtaggaataaatatgtaaaaaactaaataagcacataaacaaaaccaagatagttgtaactccagggaaatccaaaagttacaaagaaaacaaaaagtaatcatagcttcctacatggttccactgtgactagtttatatatcatcatacaaataaaacttggaatcttgatctaaaaaaattaccactgaagaatgggggttaggaagggtgcataactatatattaatagaaaaaagattttgaaaaagacagaaaacagggcttctgaaaataaacatgaatcaacagcattggttcctgtgtctgaaccatgggtgtcaggggcaatgattatgcccccttcaggactgtcaatgtgtcttgtgaaccttcttgttggagggaaaaaacccaaaactggctgggcacggtggctcacgcctgtaatcccagcattttgggaggctgaggtgtccgtatcacaaggtcaggagtttgagaccagcctggccaatatggtgaaaccccgtctcttctaaaaatacacaaattagccgggtgtggtggcatgcgcctgtagtcacagctacttgggaggctgaggcaggagaatcacttgaacttgggaagcggaggttgcactgagctgagatcgcccattgcactccagcctgggagacagagcaagactctgtctaaaaaaaaaaaacaaaccaacccaaactactgtcagtgtatggattaacctattcagacacagaacagttctggcgattattgtttaaagtgacagcattccaaaccctcaggccatcaaatctgagagcccagaacaattgtataagctaacatcagttggcttttttcccatcctttttggaaacaagtatgtttgaatacttggctgcactaatctttcaagcacatatacttaagtctccttaattttgactgagatgaggaaacaaagttggcttatttttctcagttccttaaaaacagtaactcaagataaaccctttcaaaatgcagtacagtacttttaaaacaaaagccatccaagttgaataagcgatggcagtttgggggcctgatatggctgttatttataaggtggccatttttacatcctaagagtagttcattagtcaatgcattttgagtatatcaaatttgatttgatcttatcctagcatactctgaacacatcttgagatcaacccttctcaagtgattttggtgagcatagccaaagagtaccctctgctggtcagaaaaaaaatggtgctttcacaatacccagatttactccaacgattgcatatgcatttaggttttgtggctcttaaaatgcttttttttttttttttgagatggaatttcgctcttgttgcccaggctggagtgcaatggcgcgatctcggctcacggcaacctccgcctcccgggttcaagcgattctcctgcctcagcctcctgagtagctggaattacaggcgcccgccaccacgcccagctaattttttgtatttttagtagagacgaagtttcaccatgttggccaggctggtctcgaactcctgaccttaggtaatccaactgcctcggcctcccaaagtgctgggattacgggagtgagccactgcgctgggcctactttttaaagtgtatggaagcattaactttaatgttaacatcagaatttgagaaaaagaagtttaataattcaaaatttcgtgtaaaataatcaagaactccacgtttctatcactcactgtaggctcccgtcccttccacccccgggcggggacccctcccagcgacccggccagctctcagcacttcggtccccactggcctactcgctccgacggaggggctcctgcaactgcgctgtaccgtaaatatttgctgaatcgatttgacttttacttgttccaatttcgcttttttgttgttttgtttttttgtctttttacgaacaagaggtttagagaaccacatggaaaaaaggcagggccaggcccggacaccccgcctcctgcctcccggcccggcggtgcccggatgccccgcccgcgcccatggcgcagccacacacgacctcggtcccgtacttcgcgcgctctcctgcaccgccgccgccatctcgctcaggagctcctccacaaccgccggcaacactacggccatcgcgccgcaggacacgccctccacgaccggcggaccgccgcgacgctccagctgactgcgcctacctgtggaggatcctgaccccccgccggggcagggcgagacggagtgacgtcggggcgcgtcatcgcgcgtgcggacgcagggatgtcctgctcagtcgtcagggcccggccaatccggagggcgctcggcgcgtggtcgggggccaggagcgcgtctggcctgcagtgcgcagaggacgcggcgggagcatgttccggctcctgagctggagcctgggccgaggcttcctgcgggccgcggggcggcggtgccggggctgctccgcgcgcctgctcccggggctggcaggaggtccggggcccgaggtgcaggtgccgccatcccgagtcgcgccgcacggccggggcccaggcctgctgccgctgctggcaggtgaggggcgcgggccgggcggggccggccgggcggggacaggggcgcgggccgggcccgatgacctcagagccccttcccgcagcgctcgcctggttctcgaggcccgctgcggcagaggaggaggagcagcagggagccgacggggccgctgccgaggacggggcggacgaggccgaggcagagatcatccagctgctgaagcgagccaaggtgaggcggctccgggccctgcgcccggccgagcgcggtagcctttgtgagcggggtcttggcgttgctgcgcattactctctccgcctcgccgaagagtggatggaggctccgcgggtaaaattgccgagaatgaggtgggtcatccgagaggggattggaatccatccaggcttttccgactctaaggcctgcagtaaaacctctgcagtgtcaagtgcaaatggagatggcgccctaggcatcacgctttatgcaaacgaaatatcgggaacgttttgtagtggttttatcaattaaccagcctatctgaaatgacataatttcgcacgtatatagcggcctgaaaatggcaacttagtgttggttatgcggttcggttctcctcctgaattcttccttttctccacatccttttctatttttttttcctcctcttttcccaagttatctcatctcttccattgagctaaatacctactcgatgccaacaacgtccaaatttgtatttccattctgtagtgtgctactgacatgccatttgcactttaggaccatacctacctctcagatttaacatgcccaaaactaaacgatctttaatgcctcctcaacatacgctttcgccatctctttactaccatcagtttttcagcctaaaaacctcatagtcattcttaaaacttgtggtaccttaccattgccttccaatacacttacagtccagcaacaagtcctgttgccaacaaatgcaaaatatttctcaaatctttccccttttgtctatctcccttgctgtcaccctagtgcaaaccatcattgccaccaactatgctccagtagtctttcctggcctcctggcctcttgcaatctattctccatgcagaaaccaaagcgaccaaaaaaaaaaagagtaaattggattatgtcatctccttgtcagaaagctctgaatggctacccactgcatttatgataaaatacaaactccttgccttggcttgcaacaccccacatgatctaaaccagcatataccttgcccacccatttggcagtaatcctctggctcaccatcctcccttcacatctatttctttgcatttcttcctcaaaaccattctcttcagcttgtagggacttcactcattctctaccctctgtttgagtcattgttctccccaggtccttatttggttgactcattctcatccttactacctcagtttagctgtcacttccttggaaggcttccctaagtcctatttagaggagaccccttatcattcctttctgtcatctttatagctcttatcattagttgtaattaagcttacttgtcctatatggtcacctccagcctgcaagaaattagaaagaggatggaggacaagcagcttccttataaaatatgttgtaagatcacattccttctgcctgtgtctcttggccaaaacttcatcagatggccacacctagctgcaagggaggctgacctccctgtcatctctgtagacaatgctttgtacatagtaggaattcagtaaatgtctgatgaatgagttagcttccttctatcagttgggatgtacagttgcatacacttctgtctcttagcatatgcatctactatatgtttcattttctattattttgtcttcccttttcagttgagcattatgaaagatgagccagaagaggctgagttaattttgcatgacgctcttcgtctcgcctatcagactgataacaagaaggccatcacttacacttatgatttggtaactcttataaccagtctgaaccactgatgaggaaggttggatgggagggaagggtagttagttcttctgatttatattcctgactttcacgatgttctaaaactccttttctttttactgagttttcttttggcttcagtttcattttttgttttgttttgtttttttgagatggagcctcactctgttgcccaggctgcagtgcagtggcacaatcttggctcactgcagcctccgcctcatgagttcagacgattcttttgcctcaccctcccgagtagctggattacaggcatgcatcactatgcctggctaaattttgtattgtagtagagacgaggtttcaccatattggccaggctggtctcgaactcctgatctcaggtgatccacctgccttggcctcccaaagtgctgagatttcaggcatgagccaccacgcccggccacagcttcagtttttttacccttggggtgacataagacctctcaattccagaccaaaaaaaaccagtatcattagcatgtttttttaatgatgagtggacctagatttggtttgttaacaacaaagtatgtgcaagtatttaattctcacatgattgctgtcctgtgcttcttcttgcagattaattggtgatgtgcttttcattttcaactattttttaaattttgagggtgaaagcaaaagggaattttaaagttttgaaataagtaggaacacagtattctaaactgaaaaacaatttgtaatttgctttcagatggccaacttagcatttatacggggtcagcttgaaaatgtaagtaaattgctttgtaatatcttgaatttatgaaggagtagcttcaagggaactgtaatagtaagagtacaggctaagctgctataacaaagagaccctagaatatagtgactcaaacaagataaaagtgtatttctctttattgtgttagtccagagataggctaaagactgaaggcagacagacataggcacctttgctctctgatccagaagtccaggtttcttctaagataagccctcctctgcctaggtgagctgactcacctccagtctgcaggaagggggagaagatggactgtgagcagcttccttataaaacatgattagaagttcacgttctttctgcctgcatcccttggcctaaattttatcatatgaccatatctaacttaagggtgtccaatctgctaaaattgactgaattttttttttaagataaggtcttgctctgttgcccaggttggagtgcggtggcttaatcatggctgactgcaacctcgacctgccaggctcagttgatcctctcacctcagcctcctgagtagctgggattccaggcgtgtgccacaacacttggctaattttcttatttatttatttatttatttatttatttattgtagagacgggatttcaccatatttcccaggctaaatcgaggggactctgtaatcaaaaagatggagaagagaatgactattaggagacagtttgtagtctctgccacagtgggtttggataagaacttaatctctgaggttgttttctactcatcagagagtagtttaaggtacacagaggatgttgagggtcctgatattttgatctgttttcgcttcaaaagggtacttttctgtgtgtgagtgtgcgtgtgtgtgggtatatgggttttacaaggaatgttgcatcagactggcacttagaatccagggtcatatatatatatataaaatggggcccaattaaaagaaaaatcttttccttatgcttttaggctgaacaactttttaaagcaacaatgagttacctccttggagggggcatgaagcaggtaaggacattgcctagtattggcccctcactgaagcagttttcaaaacagtcttgtctcctgaaaactcctcctagccccaccacatgctttggtcaggaaaggtggagtttcccttctgagatctctatacaaattgccattctttcactaaatgcaacagcatgcttgccaaggaattcacagttggctcatcactctaaaagaataaagactgtggctttgaggccaccgtcagtctggaagttgatctgaaatatgccatgaaaaaatttacttgttatgagttcccttcattctctttctctcacaggaggacaatgcaataattgaaatttccctaaagctggccagtatctatgctgcgcagaacaggtaagtacagcagccagggagtaggactgtgggcaggaaactttgactctgggatgttacataatattcattgtctactggtcatctgggtctcccagaaattgggtgtcacactcaaagtgttccatccctcatctttgaaattgtcagtctttttccagtttgcccctactgtttccatcagcctgcctagtggggcacacaacatctctggctgccctgtgacaaaactaactaagttttctgttgctgcttgaagtgggaagggaagttagagttagaactttagtttaacttttcctagaagaggaaagagcagtgtgaaagctgctggggataatatattaatactctgaagaagccattttgctggtataaatagagttcaaagatgaagcatctaggttgtaagcagagaactcctctagagagttgtatttgggatgaatttagggagagacctaagactagcttcccttcaggttttagtggtgcagaagttggtgcgagaggtttggagtgacatggagcctgatgctgtagaaagggtgctcactgaggccaggccctggcactgttccctactgtcctactcaccagctcctttgttctcatcaggacctgcatagtctccttgcattttgattggacactagataggctagagcttcctggagcctttgacttcaagtcttttgaggagctttgagcttggcccatgccagggaacactgcagcttggtcaatctttcttggagttgtaacaaacatgcctagttcttgattgggtatgaatccctagggtaagaagaagcccagagcctaataaacattgttgagtaagacaaattcatagtcttctagaggtgaaagctagtaacaattagcctctgagttacatggtactctgtacttttcattttgttttattaagagaagcatgagactagaaaagacatggccagatctgaggcttcgaaaggctgatataggttatgaggggaattgtttgtagacctcttgctccgactgggagcgtcttctgggcagtgtccacttgccctgtgttatggctagagagggccctcttgccaagttttgagcgtagggaaggaaggggatgcttctgttcttctgagaacagagcagaacagtagggtcataagttctcccctggcaaagcactagagaacaggtgagctttttagtgccacttctgtaagaaactagagccaaaactgaagaaaagaaccaaagctgagctcctaaatggagaagggatttctgtcacatttcctctgcatctctgtaaaaagcagcagtcagtcggcctgcttgggttgactcaaccctctccagttgattgagggtccagggctacagagttgggttaaatgacttctattgccatagctaggagtcccatttctgcaaaagaaacttttatcagagacttatagcttgaaagaaatataaaatgactaaagctcctcagaagctgtatgaggtcaacagttggaatcctcactgtagggcggcctgaactgtttagggtagtattactttgaacaggggtaaggctttcacacatggagaagttgattcactggaggccatctgttagtgggagatgatgaatactgctggctatgtcagttattaaaattagggcagcattcctagctttttgtgtcctaagttatattaaatggatgacttaaaaaaactgctttgagaaatggcagatttgacactacttagactttaagcaaagttccctcttcccattttacacttcctttactgataatgtttaaactgagctggaaaaatgaagataaaaagaatttgtgaaaaggtaaatgggccgggcgcagtggctcacgcctgtaatcccaccactttgggaggccgaggtgggtggatcacttaaggtcaggagttccagaccagcctggccaacatggtgaaactctgtctttaccaaaaatacaaaaattagctgggcatagtggcgggcacctgtaatcccagctattcgagaggctaaggcaggagaatcgcttgaaccccggaggtggaggttgctctgagccgaggtcacgccattgcactccagcctgggcaacaagagcgaaactccatctcaacagaaggaagaaaaaaaaaagaagaaaaggtaaatggctgattattgattttgctttacagacaggaatttgctgttgctggctatgaattctgcatttcaactctagaggaaaaaattgaaagagaaaaggaattagcagaagacattatgtcaggtaggaaacccattatctgggcattgccttttctccacaaaaggctttactttacacttttgagaaatggaaagagatctaaattgggaagagggaaagttacctattttgcaaaataagtgtctgtctttaaggtatcagcagaagttttggaataagatgttttatttaaaatatttgactgctgttttggtggtggttttttttttaacccccttggtaacatggtcataatttatttgttaacttttagttacatataacttaaggaaaattggggagcagaaggagaaggtgtttctcgtatctcttagttcagctaccaatcaaaatgcttattacgttttagccctagatatacagcaaattaagaaagaagagaaaaaaagctcatgtttttacaatccatcctcactcattctggaggctaggaatagaactggatgagcaggaagctctctagctctccaccattttgggtttcttaatttgggttgaagtattgagaattttcagatttgacatttattcaatacctactctataccaagagctaccgagatggtagggatacagcagtcaactcttctgtacctagtggtcttctaactctctcttgaacatagagtagtcccccgttatccatggggaatatgttccaagacccccagcagatgcctgaaacgacttctaatacactgtgtttttttcttatatatatgtacctatgataaagtttaatttataagttaggcacagtaagagattaacaacaataacttttaatagaacaattataactatatactgttaacagtgtcacagacaggagattcattcttattgtagatcttatcaacctcagcatacagttttttgttttttgttttttgttttcttactaagttgagaactttcaccttttcattaaaaggaagcactttatgacttctctttgtcatattcaaattgccagtatcaccactctcacactttggggccattatgtaaaatatggattgcttgagcacaagtactgcaacattgtgggttgatctgataactgagactgctgctaagtgactgaggccagctgccgtatacaacttgggtacactggacaaagatgattcatgtcctgggcaggatggagtgtgacagtgtaagatttcttcatgccacccagaatggcatgcaatttaaaaacttacggattatttcttgaatttttcatttaatatttttcggactctggttgactgcagataactgaaaccccagaaaatgaaactgtggagtaggagggatcactgtacaccaatttttttgttttcatcactccactgaagctacctttatcaaagtcaccaaatccaatggttacttctcaatccttaacttactcatcagcagctttaacttaggggatcactgtctcctactgaaaatactttcacttggcttctgggatgcctcactggtctctctagtgaggtgaatagacttccctacctcttaatgttggcacgccttagggctgttttcagccctattctcttttctctctgccccaacacctaggagatatcttttagttccatagttttaaatattagatttataccttcagccccaacttgcccccaaatggcagacttataattatgattgcccacccgacatcttgacttgaagtctaatggtcatctcatacttaacatgtccaaaataggtctcagttttgccgctcacaacttgtttcgtcaccagtcagccccagatttgtaaatggcacactactcatttagttgctttggccaagaacctaagaattgtccatgatttcttcctcattcctcatatctaatccatcagcaagttatactggatcagccatcaaaatatatccatactgaccatgtctcatcccattaccctactgctttggtccaggccatcactgtttcaagacctcagtacctttgtatcacctttagaataaatttagaatccctgcatggacctgtaaggcgcttatgacctgggcccacccacctcttccatgccatctgctgctctccccttgctcgttccagtctcaccacactggtcttattctggcacattccaagcttagtgccacctcaaggcctctttgcttgatattccccctacctagactgttctctcttacctttctctggccaactcccgtacttcactcaggtctctgctcaaatagcacttcctcagagtgctcccttcactaaaactatcatctcttcccaccttactattgctctactcctctttcctttacttttcttcatcacacttaaaagtagaggtgtgtgtgttgtgtgcttgtgtttctccactaaaagtatgtttttgtttaaaaatttttagtctttgtcttccatatcaaagaaggatagagacttcatccattatactcagtgctaaatcctcggtgcctagaacagtgcctggcacataatagaggctcaataattactgaatgaaagaacaaaagacccaagaaagaccagcaaataaatccagtttcagtgcagtgtggaagtgctttgaggaaatccacaagaggtgtaaaaacaagtctagctgtcaagtaagtcacttctgaactatttacacctttgctgtctttcatttatagtgttgactatggtttcttaggagtgtaaagctatattttctgattcaaaaaataataccagtaaacactgaagaaagtttagaaaagcactaagtaaaaatcatctgtaatcatactattaagaaagagctactgttttatttattactacggcttttcgggttacattttaagaaataaatttgggatgatactgtatatcctactttgtaacctgagttttaacaatttagtaacatattatgaaaacactttttttttccaggcaaaggaattcttgttagatagagcaagctaatttctattataaatattatttttacattttactagttgcacagtatagaaaatgtgttacatgattcttcatcttattttttctagaaaaggaattcctacctattcagttttgcacaaagcaaatccattatcaaatttacgtgctttttattgacacaactatctctattctaggataacattacttaattacataaaattacattacttaattacataaaaccttgctctaggataattattttgttacctatgttgtagacatatatgtacttactgaggaaatgcccataaaaaattaagtgaaaactttggttacaaaacagtatagttagtatgtagactaaaaataggaatggaacaaaggctgaatgatagatatcaaaatacaggcagtgattctctttggttggtaggtttatagggaatttatattttatttgtgtttctctgagtattctataattttgtacaaatttatatttttctttttaatttccaatgttatctgttagtataaaaagtcaaataatattaatagtacaaagcttaatttaagagagcattttcttggctatctcacccaccccatctattttttttattttttaatttttaattttttttttttttttttttttttgagacagagtctcactcttgtcaccaggctggagtgcagtggtgcaatctcggctcactgcaacctccgcctcccgggtttaagcggttctcctgcctcagcctcccgagtagccgggactacaggcacgtgccaccatgcccagctaatttttgtgtttttagtagagacagggtttcaccatgttagccaggatggtctcaatctcttgacctcataatctgcctgcctcagcctcccaaagtgctgggattacaggtgtgagccaccgcacttggccctattttcaacttttgtttttgagacagagtcccgctctgtcgcccaggctggagtgcagtggcgtgatctcggctcactgcaacctctgcctccccggttcaagcgattctcctgcctcagcctcccgagtagctgggactacaggcacccgccaccacacctggctatttttgtatttttagtagagactgggttttaccatgttagccaggatggtctcgatctcctgacctcatgatccgcctgcctttgcctcccaaagtgctgggattacaggcatgagccactgtgcccggcccctattttcaactcttaaccagtttcctctggtatttaccttcacatttctcaataatataaaattgctatttcctagttcattattttcagaatatgttgatttatggaaaagtgaagatttagtgcagtttctggttgtgtctacattatgagtgtatgaatagtgttagctgctgagccaagtaacatgattacacagttacatttccttttgtgtacgttttgcttcctctgaagttaactaggtttttttgtggctccgtttgttatgtatatgccagattcttcacttttacatattacttgctttcttcaattcataagctttcccagtattctagagttcatgttggctcacttttcattggcatggctggccataggcattcagtcttcatcttcttttttttgtttttgtttttgttgagacggagtctcactctgtcacccaggctggagtgcagtggctcaattttggctcacagcaagctccacctcctgggttcaagcaattctcatgcctctgcttcctgagtagctgggattacaggcgtgagctaccacacccggctaattttgtatttttagtagagacgggatttcaccatgttggccggcctggtctcctgacttaggtgatccacccgccccagcctccccaagtgttgggattacaggcgtgagccaccgcgcccggccgcgttatatctttttcatcctgtaagtttcattttagtggtatttggggaaggagtggagaggaatgcctgtgttcagttcagaatagtaaatctgttattgggcatcaagatagtgtccaaacctgtttttttaaagtggattcttagcactgagatttccaagtcaagagtagcacattttaaggttgttgatgactattgccaaattgccattgaaaggactgtgttaatttacatttcctggtttggctatttatgtactttgtgactttggccaaattacataatccctgtgtgctttttcttcagtgtgggattaagagtaacactcataggacctttaggaaggtggaatgagttaatacataaaacgtacttagaataatacattgtagctgctcaaaaagggtttgttagtggtttttattattgtgataagcctatgtcctcctccccaaaactcattaacttttataatctttgttagcttgatgatatggccttgatgcattatctagcatttctttgataaacagtgaggtttatctttttttttttctcaccatgtcttagggtgctaagaggtttattttttattggagctttattgtaaaaatattaatcctttgtctcttgggttttcctcctgatttgtgtttatagagtggggtttttttttctaataaaaagggaatgtgaaattaacatttgtataaagaatttatgagaattggcgagggacagtggctcacgcctgtaatcccagcactttgggaggccaaggcgggtggatcacttgaggtcagtcgttaaagaccagccctggaaacgtggcaaaaccccatgtttacaaaaattatctgggcatggtgttgcgcacttgtagtcccagctactcgggaggctgaggtgagaatctcttgagcctgggaggtggaggttgcagtgagctgagatcgcaccacctgtggtccagcctgggtgacagagcaagaccctgtcttggggctggggggtggaagaggattgtgagaatagacaagtgatccagcattgccagtacctttggagctcttcctacctgggatactattctccttaatcttgtcactatcattcaatggcatgatctcggctcactgcaacctccgcctcctgggttcaagtgattctcctgtctcagcctcccgagtagctgggattacaggcatatgccaccacgcctggctaattttgtatttttagtagagacggggtttctccatgttggtcaggctggtctcgaactgccgacctcaggtgatctgcccgcctcaacctcccaaagtgctgggattacaggcatgagccaccacgctaggcctatttgcttttctttcattttactctgtgtcccttaagaagatgtcatttagtttttgcatattgcttttaaaaatttaaataggctgggtggagtgactcaagcctgtaaccccaacactttgggaggccaaggtgggaggatcgcttgagcctaggagttttgagaccagactgggcaacatggtgagatcctgtctcttcaaaaaataaaaaaattacctgggcacggtggcacatgcctgtggtcccagctacttaggagactgaggcaggaggataacttgagcccaagaggtcgaggctgcagtgagctatcatagtgccactgtccttcagcacaggcaatagagaccctgtctcaaaaaaaattaaaattatacaaatgaatcataatatgtattcattttagggcatttttatgacttgcatgagtaatcttttcagaattagatcagaattcatttctaatttcctttgcttttattcatctttaataaatactgagtagctgttctgtgccaggtattctaggatttgaatagcagcaagtaaggcaaaagtccttgctcttctggagcttaatgcttagagagatatttttcaagctttgaaattgtatgcattctcactcatctttccttataattttctatttttttccttttatttctaaacagttttaactttttagtatatctggtattttggtgtgaagctggtgactgttttcttgcagatagtaatcaatctatatgtactaattagtacatacttgggtttcttttggggttttccattctgatgtatttacctgatgagttttataacagtatacattctttgaattatatatttgagttatatggtaggacagttgacacatgcttcctttgtaaaattccttcccacatttcactgttttcacatgaattttagaattattttgtcaagttcgtaaagtgccttcagactgaattatcagatatgcattatatttataaattagtttggggagattgccatctgaataagttagcatatctttgactgcaaagagcagaaatttcagctaaattaggtttaacagtaaggacatttatgtcaagtaactggcagttcagcaatagggagcaggctgttgagttagttgacagtgtgattcactgaaatcataaaggaacaggctctttccatccttcctcactcatgtattggctttttccccatgctcccctggtggttgaaacgtgaaactataacaattcccaggaatctcatccagaaatgacagtgtccagaggaaaaggagacttctttgatgtttctcataggatcaaggtaatctttcctagaagtctccaagtagatttgtccttacttctcattggttagaattgggttacatgccatttctaacccagtccttggcaagaaaaatggattatcatgattggctaaaatacatcagtctcctttcctgaggatgtgagtcatgtgagaaaagaacggatactgggacaaagcagctgctctgctagcaaaggaagatctttgtaatagtgagccgtctcactgaggaacattctatagctcctgcttatagttttcttcatatagatgacagctatttattaaatttgattctaactgactccttgactgaactctttgcttttcagttgatattcacactaattccagatttataatcatacattccggaaatcatgatacaggttgagcatcccccagaaccgaagctttctgagtgccaacatgatgcataaagaaagtacgcattggagcatttggatttgggtttttggttttgggatgctggcagtatccaaaggaaatattccaaactcaaaaaatctgaaatctgaaacacttttggtcctaaacatttcagataaggaatacttaacctgtaattgtttccttccagagagttatactactgtctcccttccccaccctttataaaattagttcattggctgtaccttcagaacatcaagcaatagtagtaataggaaacttagtcttatatccaatttggtaccaagatatatgaatagatttattactattatatatctagagcggaccaggcttgcttgtaggttaattgcttagtacctgtgtagtgctggataatatttaatgctgatatgtaacttgcgtttcttatgagatccacagtaaatttcttattgtattgtttgtactattatgtttgtattatttgttatcgcaggattgttattaatgtgataaaatgaattgggatgctttctgtattttctattctgaaataagtgtgggatattgcattggaatggtctgttccttgaaagttgcagagtctgtgatgccagatggaccagaactcctgagttaattctccggcagctttttttttccttcttgattactcatgtatttcttccattttcttaatttcaatataggacagtgctaaaaacataaacattaataaatatctattgaataaatgaacgtatgggtgaacaaattttataactattaatttcctagaagaaactttaaggaattatatttttaaagcatattttacactactcttacgtatctgagatcctcttccttttctagatcctaattttatggatttccttttaaattagtaaaaagatgtttcccattgattccttcctcctcctttccttgaaagtttttattttcatatattaaataaaacatttctagaaagttatttttgatgacataatatttggttccatgagtgcttaaagtctggagcctgagttcagattctggttctgccacttactagcagtggacaagttatttaacttctctgttctcagcttccttatcaataaaatgaaaataataatagaacttacctcatagagttacaagaattaaatactccaggactatgaccagtactcattaggcactattatataagagtttgtggaatgtgatatatttactaatcttatttattatatgatttggcacctatattttactattatcaatttatgaaggaccttcctggccattttatttatagtttctccttggtttttgttaattttgtttattcattcaaagagccaacttctggtttcattaattttctttattgtctttctattttccatttcacttatttctactttgtctttattacctctctcctgtttgctttgggtttattttgttcccttttttctggtcccttaggtgggagatgaggttattgatttaaggtttttcttctaacataattgccatttataactataagctttagctgcatctcattaattttggtaagttatattttcatgtatctcaagtattttccaattttgggggggatttcttctttgaccctttggatatttaggagtatattgattaatttccacatacagtgaatttctcaaattttcttctgttgaatccagtttcattccattgtgttcagagaacaactgtgcttgattttatttattgagatttgttgtatggcctcacatatggcttatcctggagaatgttgtatgtgcatttgagaagtatgtgtattctgttgaatggagttttctatgaatgtctgttaggtctagttggtttatagtgttattcaagtcttctgggtccttactaattttgtctagttgttctaatttttttttttttttttttttttgggatggagtcttgctttgtcgcccaggctggagtgcagtggcgtgatctcggctcactgcaacctccacctcccgggttcaagtgattcttgcacttcagcctcccgagtagctgggagtacaggtgtgcaccactgcatctggctaatttttgtatttttagttgagatcgggtttcaccatgttgtccaggctggtctcgaactcctgacctcaggtgatccgcctgcctcagcctcccagagtgctgggattacaggcatgagctactgtgcccagccagtttttggtatttttagtagagacgaggtttcaccatgttggccaagctgttcttgaactcctgacctcaggtgatccacctgcctgagcctcccaaagtgctgggattacaggcatgagccaccatgcccggccgataaattttttaaaatcttctttctttatacatgtttctgtgctctgtttagacagtctcatagatatatttatttgttacgaattgtcccttcatcaggaaaatgattcctttttccctatttaaggtatttgttacgaattctagttttatattatctactatatcttacccttaacttttctgagtcattttcagtgtatcttttatagaaggctatggttggaatttttttaaaacctgagtatcattgtcttctgatacagaatctgaaaaccttttaaaaattagtgaggcgaaaaaaattagccaggcatggtgacgggtgcctatagtcccagctactcgggaggctgaggcaggagaatggcacgaacccagaagccagagcttgcagtgagccgagatcgcgccactgcactccagcctgggcgacagagtgagactccggctcaaaaaaaaaaaaaaaaaaaaaagtattcaggctgggtgcagtggctcacgcctgtaatcccagcactttgggaggctgaggcaggtggatcgcctgaggtcaggagttcaagaccagcctggccaacatagtgaaaccccgtctctactaaaaatacaaaaaatgagctaggtgtggtggcgggtgcctgtaacctcagctactcgggaggctgaagcaggagaatcgcatgaacctgggaggcggaggttgcagtgagccgagatcacgccattgcactccagcctggttaagaagagcgaaactccatctcaaacaacaaaacaaaacaaattagtattgaaagggataattggtctaattattgcattttaaaaagtgctttccatttttgttaattcctttgttttcagttcctcttacaggaacttttccctctctgatctgtatttgtattttgtagggaaggtatatgtatatatgattttcagttgtataaggagtaacctaaacatttcttaaagacagttgactcagaggaaaaaaaatttttttcagtttcttctctaaaatgagatgagtacattttaacattatccttctttcccttttcctcacttgttttttctctgtgatctggaattttagacttagtggaatttattgcagaggagaattctaaagcctgcatatttgccttgttttttaaatagtctattttctcctgctcagatgctttgctggactcagaagttaaatgagcataaggttagggagttgtctgtttatgaagcttgcttagtccctggtgaaccttcatttttagcatccagttctctggagcttctgtagtctattctggctcaatgcttctgtcccacatgctctggcctcttaccctggaatgtcatttacctgtatgttgacctctcttctctatccttcacattatcccctcttccatcagttttctcatgtatattttgggagtttcttcagttgatattccacattaccaatttattattaagaaaagtcagttctgtgcttttcttttgatttgttttttgttttttgagatagggtctcactgtgtcgcccaggctggagtgcagtggtgcagtcatggctcactgcagcctcaacctcccaggctcaactgatcctcctacctcagcctcccaagtagctgagactgcatgctcatgtcaccatgcctggctaatttccggattttttcatagaggcggagtttcaccatcttgcccaggctggtcttgaacttctgagctaaagcaatctacctgccttgacctcccaaaatgctggcattacaggcatgaggcatcacgcctggcttccctctgatgtaattttttaaaattagatttcaaacaaaagtaaagttttgaggacttaccaaatatctgtgtactttcagccttggccagatttcaatattttaccatatttgctttagaattttttttggatatttaaatccctgtatacccttccctccctgcctaggggtagctactatcctgagtttggttttgtttgcctacttattgcacttgtatatatcaataaacaatatattgctgggtacagtggctcacacctgtaatcccagcactttgagaagccgggacaggtggatcacctgaggttaggagttcaagaccagcctggccaacatggcgaaaccttgtctctactaaaaatacaaaaattagcccaacatggtggcgggcgcctgtaatccccactactcgggaggctgaggcaggagaatcgcttcaacctgagaggcagagattgcagtgagccgagatcgtgccactgcactccagcctgggtgacagagtgaagactccgtctccaaaacaaaaaaacaatatacaatagggctaatatgtttttaaacttaatatgaatggtatcatactgtacaattggttttgtagtttgcttttgtcactcaatattatgttgatgagatttattgggctgctatttaaagcagttttcttagcacagaggccctgtttgcttgccaaactgcatgtctgctgggttgcgtctgtctttaaagggtgacttcctctaattaatccactggggtgaggggtaagttgaacctgttttttctgttcacaagtgtggatacaagctaaaggtggccctgtgtggttccctcactacaaccatggtatagtagtccattgtagaaatataccacagttctattgatggacctgttgggttattctatatgttttgctgttaaaagtcatacttcactgaacattcttggacttgcatctttgtgcacacctggaatattacataaaagtggagttgccagggtgcatataccaaattgcttaacaggctgggtgtagtggctcacacctgtaatcccagcattttgggaggctgaggcaggcagatcatttgaggtcaggagttggagaccagcctggccaatatggtgaaaccccatctctacttaaaaaaaaaaaaaaaaaagccaggcatgctggtgggtacctgtaatcccaactacttgggaggctgaggcatgcgaatcgcttaaacccaggaaggcagaggttgtaatgagctgagatcaagccactgcaagactttgtctcaaaaacaacaacaaaaaccaaattgctgatcaaagtggttttaccagtttacattttgactagcagtatattagtgttcatgatgttctctgtatatctttgttatcagatttttttgataatctgctgggtttgaaaaggaatttcattgtggcttcactatgtgtttctgattactgtatttatcggttattcagattacctgctctgaaaattatttcttcatatcttttgcttatatttttgaggggttgtctttttcttaacgattcgtaagagttccttacgtattcgatcattttgtatttttgtgggttacgtatctctttgtagcttgtcttttcacattagggcatttgatgtagattaaaaatttgtatattaacagaatcttgatatttatcttcatagtttgtgcttcttatgtcttgatttgtaatgacatctctatattgggttttcatagattcatggggtgctaatgtttaaatctgtaattataactatttttagtttcattataatttttccctatttaattcagtactttatttcccccactaccccccaccccccaagagacaaggtcttcctttgttggccaggctgaagtgagtgcagtgacacgatcacagctcactgcaaccttaaactcctgatatcaagtgatcctcccacctcagcctccagaagaattaggagtacaggcacgtgccaccatgtctggcttatatatatttttggggggtggtgggggagagtagagatgaggtttcgctatgttgtccaggctggtctcgacctcttgggctgaagtggtcctcctgcctcagcctcccaaagtacaggattgcaggtgtgagccaccacgcctagcccttttataattccttctatttgttcattcattcaacaattcagtcagaaatactgagtgcccattacacactagatatgctgctaggtgctgagatacagatataaataaaagaaagttggctgggcgcagtggctcacgcctgtaatcccagcactttgggaggccaaggcgggcggatcatgaggtcaggagttcaagaccagcctggcaaatattgtgaaaccccgtctctaataaaaatacaaaaaaaatttagctgggcgtggtggcgcacctgtagtcccagctactcgggaggctgaggcagaagaatcacttgaactcaggaggcggaggttgcagtgagctgagattttgcaactgcactgcagcctgggcgacagagtgagacttcgtctcaaaaaagaaaaaacaaaaaaacaaagtcaccgcctcatggagctacatttctggtgggggaaagacgcatagtaagcactacccagtaagttggtgtgtccaaagtgctatgtagatatttatgaaggaatatgtataccaggaatatgttggggcagtatggtgtcttatagagggggtagggaaggccttgttagtatgaaacctggtgaatgggagagaataggccaagtggctatttgtgagggaaaaaaattacagacaaagggcaattacaggtacaagactctgaggtggtgtatgctgcttgacttactggaagtaaggagttagaattactggagttgtctgattttctaaaattttgggggatgaggcctgcttttttactgtctgctgattctcatttatgatgaattgtcatgtttactaatcttggattatacattcatcttcagcaaggttttagctataagtgagattccagaatagttttgtgtcttccaggcactcagctcctggccgaagtggatgctacaaatttagacatcaaatttacagggtagtcatttttctcctctttagattccagacttggccattcaaggctccttgttgtctccctgtgcctgtggtcggggggttaaggggagtgtaggctggagtggtgcaatttttttcacatacatgcttttcctggggttgtggtcctaatggtaatcatcctggtttatgcattggcttcagatctcattttgtttagtacacatcaacagctttaattcctggattacagagacaactcaagctacaacaaaaaccgggcttctgctgtgtcaactcacagactctccactttgggttttagcttactcctaatttgtggctcttgggagctcagctgtgcagggaaaggatgtgtgttatagtttatctaaggtttccaggtgtttgaagcagatgggtttcatctatagtgttacgttagattctgctttattccctccactaaaaccattaacactcatcagaaagtgctaatcagttgattaacaagagatttagtttagcagaaatttcaggatattcttggaatttgggcaacaaatatctctagtttcaaagacccttgtagactttcctatattgctattgatggtgagggggtaggggagtgttagaggcctatgctcaagttttcctaaattagagatgctcttttgctattgttacaaatgcatataattgctccagtactttatcaaattccctttagtctatatttatgtaaacctagtttgatatactgaaccattcttttattcctggaataaatgctgtttggtcatcttaatacatctgattattccatttggtaatattttgagtaaaaaattctatagtgaatcctgtttgcttcatggactgagtatagtagcgtatctttttctgtgactagaagttatttatgaaagagaatcatttatgtttgaagaagtaaatatgcctcagtttcaaatggtcctttaagggctctgtataaacgattccaatatatttctcagttgttattaaagtacttgatttttttcttgtctaacttttagcaatttttatattaatatttcaaagaaccatgtttaagtaaattactagcaaaggaactctttgggggaactttatgaaattttctcttggcagttgctaaaagttttcttacgttttctaaaagttcagtaatagtacatttatctttagaaaagtttgcttttcagaaagtgtttccatttttcttgtggtcagaatgtgctgtgaattttaaatgtatttttaagatattatagctaaattgtacctcactgttttctctaaaaagttttactgcttttgcttccactccactattcagtgataacaagggtaacaagtttccactagaattgcttgtcactttattcttgtacttttgttttactactgaacatctttttaaatcgttgccacaaaatatctcgcttttatcattttcacattgctctagtatatcaactttggaaacaagacatcattctatttatagcattctgtttttagtagtggtatttccatttacaaaatacagtaattcttgatcgctgaagacgtcaaatcctagaaaacatagcatgcctacgcgtgatgttaacatcattctcgaatagttgttggttgaagattcatttgatgaatccgatttttcagaaatagacgagtctgatgatacagacgattctggtgttagttctctgtagaaataactccaagaacacttttaatagtttattttcacattgaaaatcagatttgctccagcctcaaagagtatatttatgtaaaattaggtaagcgatatagaagcaagctgcactttttttctaaatgggaaggtattaaaaaagaaaagtctcattttagtaacatagtcttccttaaactctatgccacttgtaagatttctgaaaactgaagacatagaagggaacgggcttgatatgaacgacagctttgctggtaaataaacccaactgaacctaagattatctaaggtaacctctttttctagtcttttattgtgtgaacagttacctcctgctgagttgttggcagaatttccatataatcttgcttatgaccatttctacattatttgtatcatcttttagaagtcttacccaggttgatataggttaccgttctctagatctgtgtctccaattcttcttacatggcattaggtattttaagcttgttttttttcagacatcgtatagtcaattcttgaatgtgttgagaggtgctatgtcattgtaagctttattcttcttctctgaatgattagcttgtttaaattttaccttaaattcttttttttctttttttttcttttgagactgagtcttgctctgtcgcccaggctggagtgcagtggtgtgatctcggctcactgcaagctccacctcctgggttcacgccattcccctgcctcagcctcctgagtagctgggactacaggtacccgccaccacgcctggctaattttttttttttttttgtatttttagtagagacggggtttcaccatgttagccaggatggtctcaatctcctgaccttgtgatccacccgcctcggcctcccaaagtgctgtgattacaggtgtgagccaccgcgcccggcctttacgttgaattctttaaattcagcttgtgactttgcacttcaggattctgagtgttctctgtcttcttcctgcattgtttttcttataccatacaggtttttcattggccttgactttttgttgttaactcattcttctttgggtttattttcatttgtttctgctgaatattatttgtttcaaactaaaaataacattccacattttaattgatgtgcggactcttaatctacttaaaatgtgggctgaagttccatgattccagctagtctggaataggtcatttaactggatgttaattcacctacattgttccctaagtgacatgtgggtcccattctgctgacatatttgtgggtcctggtaacaaccatttgggtagatttgctgattcctcttttctccttagtggaagagaaagccaatacccacctcctcttgggcatgtgcttagacgcctgtgctcgctaccttctgttctccaagcagccgtcacaggcacaaaggatgtatgaaaaagctctgcagatttctgaagaaatacaaggagaaagacacccacaggtaagggaggaaaacacagaagggggaatataaaacaaaggcttcaaaattgaagggtgtgaaatgtcacactcattggtaacaggatcagcagatggtcctagatcctccttggtccccagtctactcattttcttatcaccagcaccctcaccccaactacttgtttcagaaaggatttgagactagttatcagttactaggtctgcccagaactttttgcatgatccatggtttgcacaacagagcaacctttctacagagcaggactggtcaggcttcaatggacacagcacagtatttcagagtggggtctctagatacccctattagaagcttatgaggaacggtttaatacacaaatatccttgcctcccttgccccacagttaaaatggcaagaggtgagggaagggcaagggaccacattaaaaacacttaaaccattggcatattatagaatttaagtataacgtgtaaagctctgtgttagaacattaaacacattgaattgaaatcatctctttgggtctcccctccatccgagtaagttcttagatgtaaggagtgcattgctttgtctatgaatgcttgctactgccaatataagacataacaattttaactgaatgtgtcccaaggctggggtacatgggtagggtgagtaatatgttttggaagaaaagggaggttgagctatgaattatctccatgaaagggatttataacttattatgaagagtcccttaatggagtgaggaataataaacaagcaagtacagaattcagatctccaagtactagagtcagggggcttaaagcatggcatcagtggggaagtaggtatggaagtctacctcttccatactgaaattccatttcagtagccaaattaaaaaaactcctactgggcatcttcctaaaatagatggtgtatttcttgtttttgatgagcctcagggttatcagcaggaacaacataatacagtggggctccagaggcaatcaaaccataggaggctggcttctcaaagttgctcagccttaaaggagataatatgtgtagcttcttgctgttgtttttcatttggtgcttctaactgggtaattagttggattaataagcactgtctgttacctaatttccagatttgtattatttcccaaaaggtcgaactaacattgtccactgtacaatgtgattatgattaacaaatgcccacaaatttgttaaagaatggtatccctcatcttttgtggaatgctaggaaagatgaaatcttatgtattcagagttggatgcactccacattaaagttctgtgaaggcatgtttttaaagaaaaaattgttttttcttttacatacagaccattgtgctgatgagtgacctggctactaccctggatgcacagggccgctttgatgaggcctatatttatatgcaaagggcatcagatctggcaagacagataaatcatcctgagctacacatggtactcagtaatctagctgcagttttgatgcacagaggtaggtagcaatgtaaacttaactgacttgctttaagggagggatgtcactggattgatagatttgtgaagtggtatgtagggagggcaagggccaacgaataaacatgtaaattaaaagactggttgaatggcagaaaaaggaggtattgattaggttgaagtactattgtgttcaattcacgtaacttctacagacctgcactagcctgtcgaaccccatcaagctggagaaaaccttgcaatgatagtaccttacgtcagtagtgctttacagatttctaaatgtgttcagttacaatgtgtttctcacagtgtgctggtgaagctttatgacaggaagtatcattttgtcagacatttcttagtgtcagcacactataccgatcattttcagaaacctgggatgacaggtgtattacacataccaccattcatgaaatcttgggctcatcaaagtcctcaggatatactggaaagggccgttaggaatcccacagcattcagtggagttccagcctgtcagatggggatgaaatgaggcagcaccagcttgtcgcttcataagcacacagtaaattagccctatatctgcattcatgctctctcttcagaatcaccttgaaaacatacactttcttcttactgtcccttctctctgggttattttagaacgatatacacaagcaaaagagatctaccaggaagcactgaagcaagcaaagctgaaaaaagatgaaatttctgtacaacacatcagggaagagttggctgagctgtcaaagaaaagtagacctttgacaaattctgtcaagctctaaatccatttttgtgtagggagaataatgtctagtaatgtggaagaatagctatcattcctgtctctgtggcacccgatcaatggcttaaatctgtcgtttttgatattcaggtttcctcaatttagccttagtgaaggaggggttgtacacactgccatttttgtattttaaaggaaaaatgactttcattcccaactgattatgacctttcaggatgtcgtcaagtgatgctttcagttgtaacacgtgacttggtgctgtccctgctggtctaagtagaactgtagattcatatgggctggtgttcctgtgcgctgtgggtgtggtgattcagcctggcatttctaccataagtttttggtctgctgatttgctgccctgtcttctcttactttactttatcaatacctggcaaactgaccagaattaccttcctcatggcaaagggggattatggtgaattgttgttcttatagtctgtttcatgaagcacaagtggaatttaatacataaaagagaaaaatatcttagtttgctaccagcatccagcatgaagttgtaaagtggggattaggcacgtgacagtatagcacccatttgaatttaaataaaagtgaaccatatttatctggttatataaaactaaaaatgggggtgtttatataaaactaaaaactaagaatgatgtaaccttttgtctgtgttatctgaacactctacttcctttgcagccttagtcacacaactgagtcatctcaagtactctttaaggacacacagcccaggctgttctgagtcagaataggcccctacaggtatattttaaaactcttcgtaattctaatgtgtactgctggtatagctgaactactgacctggatcttagtcctagcctttttgcttttgcaatttcagtatcttcatctctaaactagggaaacactgggattctttcttagctgtgggggaaggtatttggttagatgactttgaatgaatagactgctgtgctgaaagagctttatcacactgtctcaaagtatgtaaagatacataggtggatgctcttactgcagcagtcatgaatacatttttagccatttacctaaggaaaaagacagtttttctaggtaccatgaaggaagattgaccctgttggtatgcctgtgggggtgggatgtgagtgggactgataaactgatacttttggttcgtatgtacatactggaagaatcttcataataaatgagactacacaacaatattgtatgtatcccagtaatctttgcatttctcaaaaaaaaaaaaaaaaaaaaaaaaaaaactttctgaagaaaataaaaacaccagaaaccttgaggtccaaatcctcagggattagactaaaactagagttttgtatgttgcagatgtaaatttcttcctattttctgtctaatctcatattatttaccatgcagctaatgccgtttaccaagtctagctcagagagataagatacaatataaatcagactgtttcagtagaaaccagtattaacgtatggtgatttcttaaaaaaattaatgtcaaccactcaccttttgcattgagaatgtttttaccttttcacaactgcaggggttactgaaaggtttttcattccaagttttatttatttattaattttaaatcatccacagtgactcagctcatggtctcgttgttggaaacactaggagttttcaggacagtctcttcatgtgggtgttttcattacagttcatttacactgttgtaaaataaggtactgaagcaaaaggaggactgatctcctttactgattggtctaaattcaaaagtgaattggttaaaatcgtgtcattaaaattttttaactgtccaatggtcactggagttttctgggcataaatatttttaaaatagaatcactcagtgtaccaaaattaaaagcattatgaaatttgcagtcataaacatgcagtggaaaactggctgtcagaatacttttatgaagagtattaggaagaccttaatttagttctgggtgctaaaaaaatcacgtgtaaggatatagtgtcagaacactgaaatctaagtctacaaagaatatcatgttttggtttgcagtgaaccacagtaagttgtcagtgctgctctgtgcttaccacttaaatcatgataaggtgaacctccataggtaaaccatgtgagaattctgtcctttcatttattttgaaccaagaactattattggattttaactctcattctgagatttcttctccaggtgatggtaaataaagtaatacgcacatgcattatgatgaggatggagggagtggttcacagcacctcaccttcgggtcctcaggtagaactgcaagagtaagaagttaggctctgatctgacatgttctcagaaactatacggttgaccttcaaataatgcaggagttaggggcatagaccccctaagtagtcaaaaatccacatctaactttgactcctccaaaacttaactactcatggcctactgctgaccagaagtcttacggataacatagtcgattgacacatattttgtatatgtattatatactgtattcttacaataaagtaagctagagaagagaaaatgtttgttaagattataaggaagagaaaatatatttactattcattaagtggaagtggatcatcatgaaggtcttcatccttgtcatcttcatgttgaataggctgaggatgagaaggggttggtcttgctatcttgggtggcagaggtggaagaaaatccatgtataagtggacccacacagttcaaacccgtgttgttcaagggtcaactgtattctgactcagaatagcttaagaccctcagggtcatagaaaaataccatcataatctcttttatggtaggttggcaatataaattattaacaaactctaaaatattaccagtacctgaaaaaaaaaaattcagcagaaaactgtgaagtggaacatttagtcactgtttttcattcattttgaaatttttatatgtttacatatatctgttgtaaaaaataccaactttccaagtactaggaatgctgaccactaagcctgatctaaagtttatgttggggacctcaggtatacaggagtggaacagggacaggagtgaaagctttgactgaagacaaatgtgggcttatggcctatctctgtcactaatttaactatatgggcaaagtactaaacctgtgtcttcatctgtaacatagggattagacaccagtgataggagggtcttggtcagtagctaatcacagagctgcttccttaaaagccttgagtacttttgtttaaaagtttaggtctacttgaaagtctgtaaagtgctaatttttatcatcctgagagatctgtttctcccctttccagttaccagtggcattctcccaaaactgttagtatctatgttatagaaagatacttaaatgctatgataaattgtatgaaaaaaactttaaaattcagcaagcaattcttaatgaaagataaaactggccctctagtaccataattagtttagaattcagtcttttaaattatttgcaccttgagactctgtgaaatgaaaacatttaacagtaaactcttgtcccaagggagcaaagtgagagtaaatgctggtccatagtgatggggaaaaaggactgtgttcaccatgagtttttcaggatgcagcataaagcttatctaaatactacacagatcattatcttttaacccaaccaatcatatattcaaactaagggaaaaatatgtaagcttttcctttggaacctgagacaccaggagccttaaaccacaaataatctactgtagctatggacagggtagtcaaatttatttcaaaacaaaagctttgttgggctgcatcaaatgcaggagaaaaggaatacttaggggcatggttaaattaccagtgtgcgtaacagtgaggtatgcctcaaataagcctttaaaactttataaactgaactagaacatacccatgcagtaatattttttcagtgctactaatgaaaaaaaaaaattaaagcctgcactggaaatttacaatatggcagaatttgttacttttaccttttgaccctaatgtacagattttatgacagggtctgtgttaaaaatctaaacattttcacaagattttaaacatcactggaaagctgaatttagaggaaacaatatcagataaaagtacaatgcccgtgacagccaacattatgtaactgggctgtatgaggttgtttagaaggctagggttaaaaagatagatagacaaaaagatttttaaaaatcacccccaaagttgatgcgctgatttgaacataagtacaccagatactacagcaaggggatatacactgcaaaaaggtcatctatttacagaagagtgatttaaagacattatggttttctttacagatgtaagaacagcaactgttcactttttaaaaactctacatctcaaccctccactattattatagtccactgaattgcctgtatcaaaggcagttttttgtttgtttttttcccatttgactctccaaatgaacttccatcatttcttcatcatctgtgggctggctctcctgaaaagtctcagggaataagtcacaggagggcaggtttttgacctgctactaaaaattaaaccacaaaaactagagatccctctcctgcaccctgttcccctcactttgtgcagttcagtcatcactatccgacagggtctcgtactgtgctgagagcagtggggcaggctctcgctcccagatcctgttctgttggtgaggagctgcttggttcaccgcagagggagcacatgcaatcggtgttggtggagtactgctgagcatccgcatagtcagagggttataaggaaactgagttgagcctgacaaaagaaaaattaggttttcattgtcatgaacataactggtatttcatccaatccaacttttgtaggatggagtagaataggattattgtaaaatggtcatgtgacaccatgaaagcaaaatgaatacaacacggaatggccaaagtctcaccacttaaatcctagccaatgatatatagcagtcagtgcgggtccaaaaaagaagagtaacatgagtagcatatgagtgagggctgctgagcccagaagagaaagcccaggctagatttttagttaagtctatatcagatgtttccatggagaatcacagagtcaggttatagcaagagctttcttaactcttcaagagaaatgcaagagtatagttctcagacgacaatggacaagtacccaggaacgtctgcagactgaggggcagcaggatgcaagtcatctgctgaatctcactgggcagattttaaagtctacaagattgagaaatgaggtaattaatgaacactgctacccttcatcagtttctagatgtttaactgtccccagaaagcctcctacagcttaagaaaacgcaaaaacaggctgggcgcagtggctcacgcctgtaatcccagcactttgggaggccaaggtgggcagatcacctgaggtcgggagttcaagaccagcctgaccaacatggagaaaccccatcttacaaaattagccgggtgtggtggtgcatgcctgtaatcccagctagtcgggaggctgaggcaggagaatcgcctgaacccaggaggcggaggttgctgtgagccaagatagcaccattgcactccagcctgggcaacaagaacgaaactccgtctccaaaaaaaaaaaaaaaaaaacccaaaaacataaaacataaccatttaatcaaataataaatctcatgtatggcctaattaattcttccctaagagatctgagaagcagcaaccactggtctgggctgtaagctttcaaactcaaaacaaccactttgcatgtgacatgagttttataatgcaaaagcctgatataatttacatatatcttacagggaagggcacatttcagatttttttcagtgacatatttgtatttaatcctaaggaaaagatggcttataattctctgaaactctaaaattcgtaatatcccagttttaaaagtctgttgctttttaaagctactgtgatcatagttattacatacattaagtttacaaataggcacaaaatagaaaataataagtatcctggagtattgtttttcatcagtttgtgtaaatgtagtgaacgtacagacagatgatggctttttttgtttttgttaagatggagtctctttttgttgcccaggctggagtgcagtggcgcaatctcagctcactgcaatttccgcctcccaggttcaagtgattctcccacctctgacctcaagtgatctgcccgcctcagcctcccaaaatgctgggataacaggcatgagccaccgcgcccagctagatgatggctttttaaactagtcttctcatttctaattttgatttcttagtatttccctaagaactttttctaagaataccaatatgaaaggtgaagtactcttagaagtggcatgggtacattcaggtacagttctcaaaagaactaaaaccaccttatttgctttgcaaatagtcaatgttcgctaccagtgtaatacagaagtgaggagaatggttgagattattttttcatagctcttcctttgtttatggtaatcaggctttgcattctaaaaatgtttcaggttatatgtgcattcagtttctattctgggtgtgtgcattggttgactcctgtaatactaacactttgtgaggccaaggcaggaggaatgagttcaggagttcgagaccagcctgggcaacgtagtgagaccttgtccctacaaaaaataaaaattaaaatgaaaatgaaaaaaattagccaggcatggtcgtgcacgcctgtagtcccagctacttgggtcgctcaggtgagaggatcacctgagcctcagaggtcgaggctgcagtgagccatgatcatgccattgcattccagcctgggtgacagaacaagacccctcaaaaaaatacttctattcgggaaagtggaacatattaatgatacagaaatgggaatataggtttccaaattagaagagttgctgaattttgaagaactaataaccaagacattgatattattgctctgtctcattttctaagttaaagcagaatccttacctgttgaagagggcctgtcttcccaggcccaccctggcgtctgcctatggtaatccccttctgaatgtacagaggagactgaagagggccgttccgttcctaagtagccttgcccaggtataggagacttagatttcctgctgtttgacttgctgatcagctttggtttgcaaactcctcctgaaagtgaaattcaagttaaagtattaatatattaagttctcaaaaattaccaaaatgctaatgattatatattgctaaatgaaaaaaaagcagaatggtaacatgaagaatccagatcctggtactcaatgaaataaaatactacaggcatacctcagagatactgagggtttagtaagtcacaattattttgctggtggatggtcttgcctccatgttgatggctgctgactaatctgcatggcggttgccaaaggctgggatggctgtggcaatttcttttcctttcatgaaagacttatttgtagcatgcaatgatagcattttagccacagtagaactttcaaaattggagttgatccctcaaacccttctttattaactgggtttatgtaatgtagtattctaaatcctttgttgtcatttcagccatgttcacagcatcttcaggggcagattcaatctcaagaaaccactttctttgctcatccctaagaagcaactcctcatccatttcaagtttgatcatgagattgcagcaattcagttacatcttcaggctccactactagttctcttgttcttttttttttttttttttttttaaggcagggtctcacctctgctgcccaggctgcactgcagtggcacaatcacggcttaccagctcactaaagcctcaacttcttgggctcaagcaatcctcccacctcagacccaagtagctgggaccacaggtacacaccaccacacccggctactttttaaaatttttgtagagatggggtctcaccatgttgcccaggttggtctcaaactcctgggttcaagtgattctactgcctcagccacccaaagtgctgggattacaggcatgagtcatcatacccggcctctcttgctatttctcctacacctgcagtgactccctccactgacgtcttgatcccctcccaagttatccatgggagctggaatcatctttttccaaactcctgttaatgttgatattcttacctcctcccatgaattacaaatgtcgttaatagcatctaaaatggtgaatccttttcagaaggttttcagtttactttgctcagatccgtcagaggaatcactatggcagctattgccttatgaaatgtatttcttaaataataagacttgaaagtagaaattattccttgatccatgggcttcagaatggatgttgtgttagcaggcatgaaaacaacattcatctccttgaacctttccatcagagctcttgggtgactaagtggattgttaatgagcagtattgaaaattattttttctaagcagtaggtctgaacagtgggcttaaaatattcagcaagccattctgtaaacacatgctgtcatctaggctttgttccatttctagagcacaggcgagtagaccaagcataattcttaagtggcctaggattttcagaatggtaaaggagcactggcttcaacttaaaagtcaccacctgcattagcccctaacaagagagtcagcctgtcttttgaagttttggactcttccagtagaaggctgttttgtctacatggaagatctgttgtttaatgcagtcacctttatcaaagatcttagctaggtcttctgagtaacttgctgcaacatcttcatcagcactttctccctcaccttgcacttttatgttacagagacggcttcttcaacctctgaatggcctctgctagcttcagccttctcatctgtggcttcctcgcctctctgagccttcagagaattgaagagttagggcttggattaggattaggttttggcttaagggaatgttgtggctggtttggtcttctatccagaccactaaaatcttctgtgtgtcacgaaacactgttttgctttattaccatttgtgtgttcactggaatagcactttcaatttccttcaaaaacttttcctttgcattcacaatttggctaactgtttggcacatgaggtctagctttcagcctgtcttggctttcaacatgcctttctcactaagcttaatcatttctaacttttcatttcaagtgacagacttagtgattcttcttttcacttgaacacttagaagccattgcagggttaattggccgaatttgaatattgttgtgtgtcagggaataagggagccagaggaggagagagacagggaacaaccagtcagtggaggagtcaggacacacaccacctttatgggttgtttgccatcttatacaggtgctcctcatggtgcccccaaacaattacaatagtaatatcaaaggtcactgatcaccatcacagagataataatcatgaacaagtttgaaatattgtgagaattaccaaaatatgacacagacacaaaggagagcccatgctattagaaaaataatgctgatagacttgcttgacacagggttgccataaaccttcagttaaaaaaaaaagcacaataaaacgaggtatgcttgcatttaaaagaaagccaggatttcacttgtaacaatcaaaacaaaaaacaaggttcgtcctcctgccattaaaatgtggtaattaaggaactgaaatttctgggacatcaagccttctttactggcctcagagtacagaaactactaaagaaagaaggcagggtgacaaaaatcatacttcactaatgaccaacccccctttcccaactggaattaatacaccacacaaagaaataatatgtaaaggaaaaactgcagaacaaagcttcttcatgctactacaggacttgagcagaggctcagcaagttttggtagcccttttgatttttccagactgtgtagctgatgaactcagcagaatttcacagaagtgagacacctctgactgtgctctaaaagaaaacatcaaaaagagctcagaagagatcagagcccaggtcatcagcaaattttttcctcagccccagcaaaacaatttcacactgccccaaattcctatacaaccagtacaattgtaattgactaagtcaccagtcttataaccttaaaacacacacacttaaagccaataaaaattggaaggtaagaacagaaaggggaaggtcttaaagttaacatgtatagttttttttttaagacctctaatctctttaatctttttcttaaccatagtgagatagatcttttgcttgaagataacaggaaaataaatctaaactaaaacagaaatactgctgaacttcaggtaattttgaaaagcacaagagatattctcaaaatattaagaaaaaggttgtaagattaaagcttaggattattatggtttttttgtgtgcttgtttttaacagaatgtataaaatctcattctagcaactcttatctggctatccagagacatgtctgaaacaatgcttatcagatacaagcattagcattccggatgatgtgatctgaagaactgtttctttttcttccctttttcctactctttttttttttccttttttgagacagggtctcactttgtcacctgggctggagtgcagtggtgcaattgcagctcactgcaacctctgcctcctgggctcaagtgatcttcccacctcggcccccacaagtaactgggactacagcgtgagccaccacacccagctaatttttgtaatttttgtagagacggggttttcatcatgttgcccaggctggtctcaaactcctgagctcaagtgatccacccaacttaccctcccaaagtgctatgattacaccttttttcctactctttttttatggcttacgattattttattttattgtgtgtgtctgtgtatgtatgtattttgagacggagtctcactctgtttccaggctggagtgcagtggtgtgatctcagctcacagcaacctccgcctctcgggttcaagcaattctcctgcctcagcctcctgagtacctgggattacaggcacacgccatcatgcccagctaatttttgtatttttagtagagatggggtttcaccatgttggccaggatggtctcgatctcttgaccttgtgatccgcccgcctccgccccccaaagtgctgggattacaggcgtgaaccaccgcacccggctggcttatgtttcttttctactgagcctaatttttacagttaaatcacttttattcaaaaacattatatttgtgttacaattacaatgcagtatgtatagatgaggactaggtgcaaacaaataaaaaatggacatcccaggagggtgacactttgggtaaaaattttcttccattttatttctgttcatattataatgtctgggtaggttttcaaaaaccttttttaagtaacggaaaccctaagaggtgactctgagcacataaagacataaatgaaatgtcttagtgatgcatcagaatttgggaaataaactggcttttttggggaaaagcagcagaaaagcactaaaatgaaagctgtacctgaatgaggtgatgggtccccttcctctcttcgtgtctcaccactggtcacaactgaggtgttggcagtaccaggcactactcccataggctgggacatgacaactccatgatcctcaactttgtcatcaaagcttcccatgagagccttcctgataatgtcttccagcccaagattactggcaggatcagcaaaagaatggcctctagagctaactgagcctgaaagagaatcaaaaacatttccacttatttctgaaaggccaatcaggaaacaaacatgcattgccccatcagcccactgaatacacacagcacttggcaagtgacctagaacaataccaggacccaccacacagagacctttttttttggagacagagtctctctctgtcgcacccaggctggagtgcagtggcgcgatcttggctcactgcaacctccgcctcccagattcaagggattctcctacctcagtctcccaagtagctgggactacaggcacccaccaccacaccaggctaattttttgtatttttaggagatggggtttcaccatattggtcaggctgatctcgaattccgaacctcaggtgatccgcccgccttggcctcccaaagtgctgggattacaggcgtgagccaccgcacccagcccagagaccatcttaatccacagataactccttaaggaaatttgtttcccaagtgaatcagtcacccacacttctattaaagttactcaacaattttctcagttccctagttttgacagtgttctttaatagtttcattctttttgttcatttatcttttcaataggtatttactggatctcagttcctttctgtgctactgggtaaaccttccttcactaaattatttatttatttttccatattagagcagtcactcccctggtatacagttggtactcagtacatatttgttggactgactactgctgtgccaattttgtattggtaaataatgtcttttcaatcttacctgacgtagtaactgctggcagattaaagatctcagttcctggctgagcagctgctatatttaagcaaacattcaagttaattaagatgtgataatcatatataccaaactaaagtctcaaaaaattcctataataaaattaatctttttatttttcatgatctcaacctttatttctcacccattaagtgaagataaaatggaagtattttttttttttgagacagggtctcactctgttgcccaggctatttttaaagggaaatcaggaaataggtaaggtaggaacatcaaaagaagagcaataagctgtgtgcagtggtgcactcctagtcccccagctactcagcaggctgaggcggtaggactgcttgagcataggaatttgaggccagcctgggcaacacagtgagactctcccatctgtttaccaaaaataaataaataaataaaaaaagaagcagtgtaacccagaaaagggaaaggaactttgcactgctggagaaaaacaaataggaaaatgctgttctcagaacaggaaccaaggctttctgacgaagaagaaaccttggactctgggatgaccgccacaaataccaacaggtttgaggcagcctgggatgtgatccagaggaaagccaccacagtgaatactatgaaaatgactgtgtttccctgcatggctaactggaaactcaggatatttgctggaaaaaacaaaagactctgttgatccttttcattcctgctgactgtgcaacttgtaatctgcagtttgaatgataacagcataagacctgggaaccgcctataataaagcagtgtgccagaaaggggaagaatttgggacataaattggtgtttccgtcattcccaacttgacgctaagaattttaaagagaaaaaaagaatgcagaaagcaagtgggcagccaaatgatgtgtcccaaagaatgtgaaagttcttttttttttttttttttcctttgagatggtggtgttttattcttgtcacccaggctggagtgcaatggcgtgatctaggctcactgcaacctctgcctcctgggttcaagcagttctcctgcctcagcctcccgagcagctgggattataggccccccgccaccatgcccagctaatttttgtatttttagtagagacggagtttcaccattttggccaggctggtctcgaactcctgacctcaggtgatctacccacctcagcctcctaaagtgctgggattacaggcatgggccactgtgctcagccagaatgtgaaattaattaatttattaattaatttatttttaagacggagtctcactctgccgcccaggctggagtgcagcggtgcgatcttggctcactgcaagctctgcctcccaggttcacgccactctcctgcctcagccccccgagtggctgggactacaggcgcccgccactatgcctggctaattttttacatttttagtagagatgggatttcaccgtgttagccaggatggtcttgatctcctgacctcgatatgcccgcctcggcctcccaaagtgctgggattacaggtgtgagccaccgtgcccggccagaatgtgaaatttctaatgagaccacagaaggatggactcttacccaagggctgagcacatgagaggagggaagagtgcatgtgcctagaaacaaacttggttgattagggaggctttaaactgacagaggagaaaagtcctcagaagaactagaaaacaatggccatggatgacagtcttcttacttatgggccaggtgacaaggtaaataaattgagcctgaaacagcagagccctgttatcatgaagtgtgtggaacaggagtcattcatttgatagatatttaattgagcagttatttgactgaattgttaagattaccttattgatcaaaaatggtcagatgaagacaatttcctataagttaaccaatgataatccttagatactgcacttgcaggataacccttcctttgctaatggagcttacagtgcagtgtggtacttgctaaggccatacaaattagaatcacctgggtagcttagtaaattttctacattcctggggctccataattcaactatttaataagcaatccaggtgactggtacctactgttgagcaagaatgtggtaactgctcagaaattagcagaatggaaggtagacatgtgaaagccactgtggaggccaacttgacaggaggagctgactcccatcaggaggcagagagaccaggatagtaatggccagagtaatggtaactgttaactgtggtagggaaggaggaggaactttttgtatggggaggtagaacatggattcaattttagatatttaaggagccagtaagttagtcaagaagtaatgaggtctgcaaagatatgtaagtagagcttagtaggaaaagctgggctacagatacaaatttgggagttttcagcatacaagcgaccattcaactccccagagtagatgagatgactcaaattataagacatgaggagaaaggggctaagaagtgagccctggggaaaactaacaatcaagggccaggcaaagcaagactgagcttctaaggagacagaagtggccagagaagtagagaagaaacaggagaacatggcatcagaaagccaagagaggaaagcatttcaggaaaggaaagtggttcactgtgtcaaaagctgcaaagagatccaataaagtaagttttaaagcattacagttttcaaaaaaataaagtcactgatgtccttgggaacactggattcagatacaatgagctgaagtgaagctgtgttggctgctgatggctttcatttagttctacttcccagtgaaggctaaatgtgccatggtgggcccaggagcccactggttctttaatataaattctcctttccaccatgaaaaatagttcttgcaataaaaaaaaaatcccagactctaaagcaattctgttagtacttcccttaagacattaattatctcctgttaaagttaggtacttgtttcatcatacagcttcagagaatagagaccatgtggcatactaaaacacccaacatagtacgctactgaaaacattaggcaagagagaaaaaactataaagtaggcttcttcagttcaaacatggcatttccctgtcaaagagtttcccactttaagggtaagacaaagactacagaatgagcagaccacacaaaggtgaaatgatttgcatctcagttcctggctgctctgagatctctagctctccgtgctcacacagattcatctctgagtgccaagagaaattgaaaacaagagtatatttttgttggtgacacttgaggagctgtaaataatagattaaactgttgaagactggagacagaaaatagtaataacaatattttttgaaaaggtggccggatacagtggttcacgcctgtaatcccaacactttgggatgctgaggtgggtggatcacctgaggtcaggagttcgagaccagcctggccaacatggataaaccccgtctgtactaaaaatacaaaattagccggatatggtggctggtgcctgtaatcccagctactcgggaggctggcccaggagaaacacttgaacccgggaggcggaggttgcggtgagccgagatcgtgccactgcactccagcctgggccacagagtaagactccatctcaaaaaaaaaaaaaaaaaaaagaaagaaagaaaggctatctgtaagcctgataacaattctggtcagcattctaaaatatttgtcttttattttgttgccacctaaacagaacctagtaattaagagcgaggacaagttcagaaacagtggtgacactggctcatccttttttccttggtgttcaacatttattaatcacaagagtgacacagatctaaacaaacatccaccaggcagttcacagtgcaaggcccccactttcctttcttttgacaggatcaggagactagtagatggtagatcacagaaataaagcagatcgtcctttcctcagctgccaccacagtgcttggtccttccaaggaagctaaggccacgttgggatgaggccctcacttcatccggcaactaccaccacgtccggcagcgccagccccacacttgcccataccatgtcctctgtctccgagctcgcctgcatctactcagccctcactctgcatgacaatgaggtgaccatcacggaggataagatcaatgccctcgttaaagcagctggtgtaaatgttgaacctttttggtccagcttgtttgcaatggccctggccaatgtcaacattgggagcctcatctacaatgtaggggctggtggacctgctccagcagctggtgctgcaccagtgggatcctgcccactccactgctgctgctccagctgagaagaaagtggaagcaaacaaagaagaatctgaggagtctgatgatgacatgggcttttggttgttttgactaaatttcttataacgtgttcaatacaaagctgaacttaagaaaaaaaaaaaaagaataaaccagactatggtctacccaaagtctctctatcaaggggactgaggaaaagactgataagactggggggatagttagtacaagtgagtgctgagagaacacgaggaggttctgattaatacttgcatatcaacccagaggaaaaaggttctgccacagaacattagctagaatatttaccaacaatctggttaagatgctatgagtatggaactgttagaagccagttggtccatcattagcaacatggactctggagttggaatgcctgggtttgaactgcagcctcattacttactagatatgtaacctgtgccaactcttaaacctgagtctgtttcctcatctacaaaatggagataattgtaatatgtagggttgttgtgaggattaaatgagactatatctacacatgcttagaatagagcctaccacatagtacgctagataaccttttgctaccattattactgattttatatttttattttattaatttattattttttgagacagagactcactttgttgcccaggctggaatgcagtggcacaatcttggctcactgcaacctctgcctcccaggttcaaatgattctcatgcttcagcctcctgagtagctgggattacaggtgcacgccaccatgaccagctgtttatatttttagtagagacagggtttcaccatcttgcccaggctggcctcaaactcttgatctcaggtgatcaacccgtcttggccttgcaaagtgctgggattacaggcgtgagccaccacacccagacaatttaaaaaaaatttttttttttttcttgagacatctcactctggcttaggctgcagtgcagtgatgcgatcgtagctcactgtagcctcaacttcccaggctcaagcaatcctcccacctcagcttcccatgtaaataggactacagggatgtataccaccgcacccagctaattttttatattttgtagagatggggtctccctgtgttgtccaggctaatctcgaactcctgggcccaatcaatcctcccgccttggcctcccaaagtgttgagattccaggccaatgttttatttttacacggttagtttatcagagttgcatatgaatagtgaatgaatcaactcaagtccacaaagacactggtagggtagaaaaagtagctggactggagcaagcacagacggacttggacttgtcctatacttggagctagttactgtaaaagtagagcgagggcaaggcatgaattaaaagtagcccaagaccttgacatcaacgttcatactaagtacttaacagtgcacttcataacttaacagtgtataggctgccaacaaaacagctaatagtcttaggctactttaaaaatgatgaatttagcatagatcatattatactactctattttgtattactcgaaacctagtgaaaggctaggttaaatgtttttggtggagaataactgagatggtaggggtactaagaatgaggacatgtgacccacagctgatgaaactggggacactgattgagaggactcctgaaagacacgtcttcaaatatctgaggagatgttatgtggggataggcccaaatggacaaaatgaagactgatgggtaggggagaaagaaaagtaaactatggagagttaatccagtcctacataaagaaaagtaacctagacacagcatttcttcaaagagaaacggcacagcttcagaaaggagcgaactcctgcctcctaattagaactcttcatgggctggcagacacttgagaaggaactctaggatcagatgtgttggacagatgtcctgtaaagagccttcaaactcaagcattacaggagaggcaacactggagatatcattattaatgcatgttttatttggggttcatgaaagaaatcccacttacccatatcagagtcacctccaccagaggagttcaacttacgaaaaatctcctgcttctttgatttaaccatgggtgatgtattttcaagcttggtgaagaatgaaggcaagtagcttatactccctggtgagcgggcatcattcctgttagggccaaagttaagtatattacaaccacgtactcctaatcctggggacattcctatcaatgataacaacagtcagagagtacttagaaaactactgcctcctcatcctgtgtttgtggttacagccctaagaaacagtatgtaatcataaaccacttagtacatcatttgaggaaaaatgatttagctctcaaaatgaaatcataaaattagaattagaatggagataatctagagcagaaattcttaggaaggaatgaagaagcagtaaatgaatattaataggaaaactcagaaacagcttatgatgctctctccttaacagcacaaacactgatatattaatggttaccacctaaactgggaacaattttactagaattagttttaagtacactaaaattaaaactaatagcacgcttgactacaaaatagcaagaactcatatctaagcaatcaacagctggactggaacacaacagtataggaataaaactgcctatttgttacaatcatttcaagcaacctaacaaatgagctgagtttaatataaagagtttcatattttactggcagcttcctatactaacacatttaaaaaaaaacaaggtttccctaaaaactccaggccaccaaggatctagctagagccagagatgagaacagagactataggttattgaaaacctaatccaatcatgtggattcagtcatcattcaaacacaagaacacgtactctatgccaggaaagacaattaaggtgataggaacaggaataagacatggtccctgtcctcaaaacactcataaacgtaggggaaagatgtaaatgtataattaaattgaacatcactccctctccaaaaatggattttcttcatttcattgaaaagtagcaatatctgtttagctccctaagaataaatgcaataaattaatagcaacactttgtaagaaaggcactagcaatttggagttagaaaggccttcgtttaaaactggcccttccccattagtatcagtacgaccatgagcaagtgacatgtctggctttcagcgcatcagtggagggttcagcactaggcaaactgcacgactatggacagaaaggaattcagggaacaataagcaacatgatttggacagagattccagtgtagggatgatgcagagggaagtgaagctgaatgcgcagcatacacctggtcatgccaggaactcagatgccatgcaaaagactgggtgctggattctgcatgagttttagacaaatcactcaggtggaggtatggagactgactggaaaggagccaactcaaaggcatctagtcaaatggggataatttaataattaatagggttggggtcacggttagaaataggtaagattaaatctattcagagtccacagtgcttggtatacagtaagcattcaaatgttggctgaatcaatggatgaccctttcccctagacaaaaacattaaaaaaaaaatctagaaagatttaatttcaagaataatgaacaaatattttctaacctatttaaatatgatattataaatattttctttttgctaaaatacactagcattagatgagtaggaaaagagacaaatgatcctctaagaatgccatccagacataaaagcccaaagttctgagaaaaacggcaacaactgaaggaaatgttaaagcatgagcacccacgccatgaatggttgctgtcactaggaagcacacttacctctgctctgcaggctctgcgcccctctgagacaagagcagcaagctgtcctgtttctcatgcacaaccggaacctggggtggggagatgggctcgtagggctccgaagagacgtgactcctctctggggattttccaggcctactattgtaatatgtgaaatattagattgtgtttcaaaggctaacctgggacttacctaaacagaaacttgttaactcatgacttcattcaggagaaggagcaaaagctgccaatttctatcagaaaaaaagttgcctcaggtattcactatatacatagttaaaacaaacaaacaacaacaaaaaaaaccactgtgttactgccacttgacccatgcgcgccccgtggatccaggagtcacgtcatcagacagtgctgcccgggcagcagcagtggcagaagctgcgtccttgaggctccgcatgtccttcaacatcagacaccatctcacccttggctccttagtccaggtgaaacctcaagggttttcctacctattttgagtcgactgaccagttctttcatcgtcaagttaaagataaaggacttcagtactaaactgacacccaagaagttttatcaggtgagtcaacataggttctagttacactatattatggcagaggggttctctgcaattttatattttttctctggataccatttggtaagaataatataagatagacacactgtttagctcccacccatttatcattttttttttttttgagacagagtctggctttgtcacccagcctggagtgcagtggtgtgatcagctcactgcaacctctgcctcccaggttcaagcaattctcctgcctcagcctcccgagcagctggaattggaattataggcatgcgccaccataccccggctaatttttgtatttttagtagagacggggtttcaccatgttggctaggcctcctgacctcaggtgatccacctgcctgggcctccaaaagtgctaggattacaggcctgagctaccgcacctggcccatttatcttattattaaaatttttattttttagagacagggtcccgctcgttgcccaggcaggagtacaggagtgcaatcatagctcactgcagcctcaaactcttgggctcaagtggtcctctcacttacatctcccgagtaactgggattacaggcatgcgtcaccatgcccagctaatatttttattatatgttttattatgtctggtggcccatttttaattttttgtagagacaggggtctcactatgttgctgacctcaaactcctgggctcaagcaatcctcccacctcagcctccaaaagtaatgggaattacaagcacctcgccccaccacaccctcaatttttttttttttttaagacagagtcttgctctgtcacccaggctggagtgcagtagcacgatcttggctcactataacctccacctcccaggttgaaaggattctagtgcctcagcctcctgaatagctgggattacaggtagccaccaccacacttggctgatttttgtagttttattagagacggggattcaccatgttggccagaatggtctcaaactcctgacctcaagtgatccacctgcctcagcctcctgaagtgctgggattacaggcgtgagccaccacacccggccctgctaaaattttttgacatagcgattatgcatatgaaagccacctgtgactttcaacatctggaattatgactattagactaaagcaaaattataatatgatttgttatggcctttctcaatcagcccatccagttgttcaagatagccactttttttttaagttgttttgctgtttacctccaaaactctgtaaataatcttaaacatgttttttttatttataaaacttgaaacagtatctgttaactctcttccatgaaagatgaagaatttgatttgccttctctgttgttgcccattttatttttatttttatttttatttttgagacagggtctccctctgtcacccaggctagagtgcagtagtacaatcactgcttactgcagcctcaacttctgcgctcacgtgatcctcccacctcaggctcccaagtagctgggactacaggtgcatgccaccatgcctgggcgattttattttttagtttttttgtggagatggggtctcactacattgcccaggctggtcttgaaccgctggcctcaagcgatcctctcgccttggtctcccaaagcactgaaattacaggtgtcagccactgtgctggcttgcctattttaattttgtccattttgcctttacatagcatacttcagccttttatattttcttttttaaaaatgaagaaattagcacacatacccttacttctccatctctttcctatgcaaccctcacctcccaatatctgtcagccatttttaagatttattgcatcacatccttttctagaactacagagaaactcctctgtgttttgcttataaaaatcactccatacaattacatagaaattcaataacctgctcctggagtacataatgaaataaaggcagaaagcaagtttttttaaactaatgagaacaaagatacaacgtaccagaatctctgggacacagctaaggcagtgttgacagggaaatttatagcactaaatatccacatcaaaaagttagaaagatctcaagttaacaagctaacatcacaaccaagagcaaacaaatcccaaagctagcagaagacaagaaataaccaaaactgcagggggcgcggtggctcacacctgtaatcccagcacgtggggacgctaaggcaggcggatcaccggaggtcgggagtttgagaccagtctgaccaacgtggagaaaccccgtctctactaaaaaaatacaaaattagctggggtggtggcacatgcctgtaatcccagctactcgagaggctgaggcaggagaattgcttgaaccaggaggcagacgttgtggtgagctgagatcgcgccattgcattccagcctgaacaacaagagcgaaactccttctcaaaaaataaataaataaataaaataaacaaaacggaagctgaactgaaggagattcagacacaaaaaaacactcaaaagatcaacaaattcaggatctggtttttgttttgttttgagatggagtctcgctttgtcgcccaggctggagtgcggtggcgcgatcttggctcactgcaagctccgcctcccgggttcacgccattctcctgcctcagcctcccgagtaactggaactacagatagatgccggccaccacgcctggctaattttttgtatttctttttttttttttagtagaaatggggtttcactgtgttagccaggatggtctcgatctcctgacctcgtgatctgcctgcctcggcctcccaaagtgctgggattagaggcatgagccacggcacccggcctcagaatctggtttttagaaaaaattaataaaacagactgctagctaagactaatagagaagattcaaataaacacaatcagaaatgacaaggaatattaccactgaccccacagaaacacaaacaatcataagaaaatattatgaacacctttatgcatataacctaggaaatctaaaagaaatggataaatttctggtcacatacaccctcctaaaactgaaccaggaaaaaactgattccctgaacagaccaataacatgctctgaaattgagtcagtaataaatagcctaccacccaaaaaaagcccatgaccagacacattcactgctgaattctaccagatgtacaaaaagagctggcaccattcctactgaaaatattccaaacattaaggaaggactcctccctatctcattctatgaggccagcatcatcctgataccaaaacttggcagagacacaacaataaaaagaaaacttccggccaatatccttgatgaacatgaatgcaaaaatcctcaacaaaatactggcaaaccaaacccagcaaaatattaaaaagcttatccaccacaatcaagtagatgttatccctaggatgcaaggttggttcaatatacacaaatatcaatagatgcagaaaaggctttcaataaaattcagtaccctttcatgttaaaaactctcagtaaactagatattgaaggaacatacctcaacataataaaagagccatatatgaaaacccacagccaacatcatactgaatgggcaaaagctggaagcattcctcttgaaagccagcacacaacaaggatgccctctgtcaccacttttattcaacatcctattggaagtcttgaccagggtgatcaggcaagggaacgaaagaaagggcatccaaataggaagaaaggaaatcaaactatctctgtttgcagacataatcccatatctagaaaactccatagtctcagccccaaaggtccttaagctgatgaaacaacttcagcaaagtctcaggatacatcagtgtgcaaaaaatcactagcgttcctatacaccaatgagagccaagccaagagccaaataaggaatgcaattcgattcacaactgccacaaaaataataaaatacctaggaatacagctaaccagggaggtgaaagatctctacaaggggaactacaaaacacttctcaaagagataaaagatgaaaagataaaaaatgaaaaaacattccatgctcatggataggaagaatcaatatcattaaaatggccgtactgcccaatgcaattcacaaattcaatgctattcctattaaactaccgaagacattcttcacagaactacaaaaaactattttaaaattaatatagatccaaaaaagagcctgaatagccaaggcaatactaagcaaaaagaacaaagctgtaggtgtcatactacctgacttcaaactataatacagggctacagtaaccaaaacagcattgtattggtacaaagataagacacacagaccaatggaacagaacagagaacccagaaataaggcctcacacctacaactgtctgatcttcgacaaacctgacaaaaacaagcaatgaggaaagaattccctatcaataaatggtgctgggataactggctatcacatgcagaagactgaaactgggcttcttctttataccatatatatataaaattaactcaagatggattaaagacttaaatgtaaaaaaaaaaaaaaaaaaaaaaactataaaaaccttggaagacaacctaggaaatacctttcaggacataggcagggacaaagatttcataacaaagacaccaaaagcaactggaacaaaaacaaaaattgacaagtgggatctaatttaaagagcttctgcacagaaaaggaaactgtcaacagagtgaacagacaacctacagaatgggagaaaaattttgcaaactatgcacctgacaaaggtctaatatccagcatgtataaagagcttaaacaaatttacaagaaaaaaacaactccattaaagagcgggtaaagcgagtgtggtggcatgtgcctgtaatcccagctacttgggaagctgatgtgggacaatcacctgagcctgggagggttgaggctgctgtgagccgagactgcgccactgaaatccagcctgggcaaacagaatgagataaaaaagagagtgggcaaatgacatgaacagacacttttcaaaagaagacatatatgcagccaagaagcatatgaaaaaaaaagctcaatatcactgatcattagagaagtgcaaatcaagccaggtgcagtggctcatgcctgtaatcccaccactttgggaagctgaggtgggtagatcagctgaggtcaggagttcgagaccagcctggccaacatagtgaaaaaccctgtctctactaaaaatacaaaaattaaccagatatgggggcaggagcctgtaatcctagctacttaggaggctgaggcaggagaatcacttgaacctgggaggtggaggttacagtgagctaagatcacaccattgcactctagcctgggcaacagggcaagactctgttttaacaacaacaaaaaaagagtaagtgccaatcaaaaccaaaatgagacaccatctcacaccagtcagaatggctattaaaaagtgaaaaaataacagatcctggcaagactgtggagaaaatggaacacttatacactgttggtgggagtgtaaattagttcaaccactgtggaagacactgtggaaattcctcaaagacctaaatgcagaactaccactcaacccaacaatcccattactgggtatatacccaaaggaatataaatcattctattataaagacacatgcacatgtatgttcactgtagcactattgacaacagcaaagacatggaatcaacccaaatgcccatcagtgattgactggataaagacaatgtggtacatatacaccatggaatactatggagccatgaaaaagaatgagctcctgtccttttcagggacatggatggagctggaggccattatccttagcaaactaacgcaagaacagaaaaccaaataccacgtgttctcacttataagcgggagctaaatggtgagaacacacggacacatggaagagaacaacacacactagggcctattggaggatggagggtgggaggagaaggctcaggaaaaaataactaatgggtaccaggcttaatacctgggtgacaaaataatctttacaacaaacccccacgactcaagtttacctatataataaacctgcacatgtactcctgaacttaaaatgaaagttaaataaataactaaaatgaaaatcagttgatgctgttttctaacaccacagattgtgcaaacattttcatcaggaatggaccatgacaatgctatatagttttccatttttctttgataatcacatttcttttctttttttggttttgttttggctgaaagggaataaatgtgctttcatcttatccttaaggttatccagctgcgtctaatgactaagtccgagatttgcttcaaaattatccagtttgggggtcggggcaagcggggatgaaaatgaaacaaaactcgtcatacactgaggattaccaaaattgggtgatggatacctagaggtgtattatacttgttctctctacttttgtatgtatttgaaaacttccacaataatttttttttttaaagaagaccatttagcttcttatttatattcttctatctgctctttgctcactttgatgggttggtaggtaggctggagaatcacttctgctacaaatttctctttttcaggctctgagccatggcttccattactctggctcatgtgtcctctatgtcttcaggtatttgccagaatctttgatctgcccatatctcagtcttgttctcagcattctttttatcttttttttttttttttttttttgagacggagtctcgctctgtcgcccaggctgcagtgcaatggcatgatctcgggttcaagtgattcttccgcccaggttcaagcgattcttctgcctcagtgtcctgagtagctgggattacaggcacctgccatcatgcctggctaattttttttttgtatttttgtagagacggggtttcaccatgttggccaggttggtcttgagctcctgacttcagatgatgcacccagcttggcctcccaaagtgctgggattacaggcgtgagccaccacgcccggccttctcagcattcttaaatttatttccctttgtgcttgttaactataatttaacatttgctaatatttagtctaccactttgaagcaagaatcctgtgtccactttattttaaccaaacacagaatatcaggtaagaagatatgctctttatcagagagccctggcatataacatgtttccactcatgatgccactattggcttccctttcctttatttaaggtcaccttaaaatatatatgtgtgtgtgtgcatatatatatgtgtgtgtatctatacatacatatatacatatatatatatataaaattattcactgacagaagtctgaggcctagaataaaatataaatgcagaagcaagcaaacaaacaaacaaaaaatatataaactttttttttgtagagatgagatctcactatgttgcccaggctggtctcaaattcctgggctcaagcaatcctcctacctcagcctcccaaagtgctagcattacaggtataagccactatgtctggccaatatcaccttcttaaacttctactgatgctgacccagtagaaaccattgagacagataaatatgagaggtattattcggaagcaccactgaagtgtccccaaaccactaccaaactacacattcttcttaactgtctttacaaaccaacaaatagaatataatcatcttttgaatatacattaaaaagtcatagtaccaaatgccaagacagtggacattctaagaataatatgcagggggaagaaagctcatttacactttcctgggaataaaggcaaatgaactttagttgtgagaaacaaattccttatcctgtagatatattccatttgttttactgttgggcaatttatatataatttggaataaagatcataccttcccctggatttgtccacaagattttctggagagacccttgaacctggtctttgatgatggacagactgagcctgggattctgggctgtaacggtttgatgttttagtcctcacaggtgtagataccaaagcagaaggtgagttctggaatgtagaagtaggaggctgctggggagtctgcgaggaaacttgatttctagcaaaatcttgtgtgataatttgctgtgaatgagaaatgaaggaagtggtaaaattcattgagtacttgcaaaaaaaaaatagtattaagaaatctagatatctttattataaatttctttttctatatgaaatctgctttccccatgatcaaaaaagaaaaattaactaataagaataatgaaaaacttacacagatgtgatcagcaagtgtgatcagccgatgggtcctgggcacttgccccattccctctgcctgtgaagaagggggcagctgttgttggggagatggtgattcctgctgtggtcgatagtgatgtaatggtccttcatattgtctggtaggatcatctaggagagaacacatagatgtcttactccaggaatgtctgtgcttttcactcattatcaaagattaaatataattcagaagaacacctgaaaggatgtggtacatagctccaaacaaagaacttatcttaattttggagaaaaaaaaaattattcactgaagaagtctgaggactagtggaacaaaatataaatgcagaagtaagcaaacaaaattaatataaacaattttctgtatcattaaaaaataaaaaagaatcgattgctgtttctaaagaaggctcatgtaagattaccctaaaacaaacaaaacaagttaattcttactatggtctagacagataattagaagcaaatgataaatgcaaatatgaaaacatgtaaatggtagcttaagaagacatactttccgcttgatttgccttaacaacctctggctgataggtctgcagtttctcctggggtggcgcaggtgagctggcaggacttatcacctcaatagcatcgctaggtgtttcatacctgtgagaagatactttaagaaaagaaaatcttatttcaaaactaatcccaggaaaagtttctgaagtctaagttcttcacacctgtagcattttttcaattctgatccaccatgttcaaaggtattccaggttaatgagggttttctgaagttttatgggctttaagacatgttttaggctgggtgcagtggctcatggctgtaatcccagcactttggaaggccgaggcaggtggatcacctgaggtcaggggtttgagaccagcctgaccaacgtggagaaaccctgtctctactaaaaaaaatacaaaattagtagggcgtggtagctcatgcctgtaatcccagctactcgggaggctgaggccggagaatcgcttgaacccgggaggcggaggttgtggtgagctgagattgtgtcattgcactccattctgggcaacaagagcgaaactccgtctcaaaaaaaaaaaaaaaaaaaaaaaaaaagacatgttttaaagcccaataataaacactggaatgaggcagaacagagaacagatttatgatattttcctgggagctggaaaagaaatcaccagggaaacatttatggaagaggttaataaacaaatgagggagtagatctcaataactgattccaatgattccaattctgtgggacactctgttcttagaaaaacgctgaggctataaagctgcttcattcaccaccatgatgattttaaagctatggattatataacactatataatgattttctcaaataaatggagtattgctaacaaaacttactccaaacattaataattttttagcactgtgttacattgtgaaaataaccagaaatggtagagaatgtctgaagggaagtatattcccagaaagggaggatgtcaaccaactctggaggatacccacatcagaaaaggacctcctctaagacacagttcccaagtaaacagagggctatgcagtggggctaacaggcagcttttcacagtcctgccatagcctcagagctgacagttgggagcagatgtaaccgcctgctcaggaacctctgaattcagagggctcttcacatccacaaactgcactacagaatctgagagcactgtcagagctccaaagggtgcatggccctgggctggacacagatgcagcaggtgggaatgaactctgctccctagccaccacctgctcctctggtactcaacagtccttcctatccccaccaggtcatggaaactgcagctacctgggttctagtacacttaggagattggaaacttgataaatggaacagaaatgatcattgagaaactaaaataaatcactatattctaagaagtttacagtaatttgtgacttttgtatccactgttactcatcactgtttatgtattcaacatcctaaatctggttacaacttccaatattcactcagtagaaagtcggaatccaaaccgtgttcacattgttcttgaagccttaaggggcaagactatggcaatggacctccccttcaggatgaggaaggttctcaagagtcaaactgaaaaccacactgaagaactgtacatagcctttggacatcatggaattcactgaccagtgataaaaaagataaccacacacagagacatggacactcagaaaagatgagctttctattttcacaccttctgaaaatcaaattcctaaagcaaggtttggtttgtgatgcaaactgaaaagaaatgtttaatccaatgattaaggaacccatgtgctataccattcaataagcccaggtgggatctcccagtgtgccggtgacttcccttcaaaagacctattcatacaactatagaatatctctttctcagctagcaattttctgcatgcagaaaatctatattgcagattttcctaatctcaggttaaaagaagtcttttgtctacacaacactaactctctctctaaaagcctcagcaatgcggtagatatgacgtaaacaaattataattaagctagtggatactcagagatcaaaagaactgcacattgcattctggagcatgagaaatcattttttttttcatgatgtctaactctactgaatttattcaatggagataacagaaagatgattatatatgattaaattacttccagtattagcagatgcttatttaaatacttgcttgttctttctgcaattccacatagaattaaggcaatagtttaaaagaaaatttaaaaagtaacttttctagcattttaatgtagacctgtgaattctaacacatttgcagtgtagccatcctaatgactaaccagacttgaacaaaatccaacttgcaaaaacgatgcaatataaataccaatcaccaataataggtagtctcacttttaaaaacctgtgtcttagaaaaaggatattagaggctttggggtattggcataaatatagaaccatgtcctagcaaatgcttcctgagaaattacacctcagtagcccagagcctggcgatatatccattacctttcagatgcctaaatatgttaataaggtctgccttctactttccaaatttaattacatgaatgatacagttttcttgtggaagatacattgataggcttatatgtaggaaactgggatatttaaataatcataaaaacagcagaagatacatttttgcattacatttactatcaaccgttaggatttttaaataccatatagttctacttgacctaaagaataaagtaattctttactcagacatcacattgtgaaactcggattgagatacatacagctactagaagagtctgaactttgagagccacgttccctcgcatccttgtccgaggcaatttgccgggtgatgatcacgtctatgaagttagctgcagtaatggtagtcttccctctggtccttagctcttcctcatatctggattttggaggaggccctttatctttcccagcctcagaataaactactgaagaatgaggctggggcttgccacttggaaaggctgaagaagtgtataaacactgaacagatctcttctccacctccagggttttctgctctagctgctgctgttcactaactgctgctgacctgcttctcaaattttcttctaacctggcagcttcatgcttactctcttttgttttggacacatccatctggggtgcagaagctgcagcatccacaagagcagccagggcatccgcagcagtgttgtaacgggaggctggcaggccttggcttattgaagggcccccagcaggcagtggcctgtaaataaaaccaaatcacagctctgtgaagggaagaccatttgctgggaatgtggtggggagatggaaggacaaactgcaacaacaacaaaaaaagccttcatggcatgggcagaaaagcatgactatacttagactattgcagtcacaaattttaaaatgtatatgcaagagacattttttgtcaaaatatgtacaagagactgacatgattcgtagctgagcagttggatccaaaggtgtgattacactggttccattggttccttggaaaacactgggtctctgttgcaacatggtctcctgagttcttactgaaggggaaggggagcgaacatatccatgactgccaggtcggccaggctgttctgagcctgcagaggtgaaaaagagaaagaaacaaagacataaggaggaagccagagacaaaaggaagcaatgcttatggattgtttatttcctaacatacctaaatagaaaaaagaaaaacaagataagaaacttgatagtctactttctggcctttccagaaatatgttctaaaagtgtccaaataaagatgcaataaaaccgcagcagtaacttgaaacaaaacatcagccatcatttactgtcatttccatttctctgataaatttcaatcttgattccataaataaaacagcaccaacaagaagtactactacaaatcatataagttcatctttctgatttttcctcaaactctagtgtgtatatgatttccaaaatctaatcaggcacaactttctaagcatcataatgaaaataatataccactgctacactagggtttgagactgtttcattcaaccacagtttgccctgcttcacttcttcactgtccccttcacaggtgactctttctctcagcaagctctctcttttgaaatgaaatcattcacattatcttcccacaaaacacttggctcccacaattacacttctacaatatttggtatgtttttgttcacttaaccctaactctcccataaccaagtcagagcttggacttggtaagaactacttcacgcagaggattctgaactctcaaatccctccccagtcactttcttcttgacctcatcttgttctgtgtcctcactccaaccttctaacgtgctcactggcttcataacagctagctgttttatgttttagcacacacccctcttctcacagacaccaccacctcagccaggcttctcagcagttttctcccttctaaccattcatcagcttatatgaatatttatttttttaattaaattaaaaaatttttaagagacagcatcacactctgtcacccaggatggagtgcagtgacactccatagctcactgcagcctcaaactcctggcttcaagggatcatcctacttcatcctcctgagtagctaggactacaggtgcacaccacggctgctggctaattttttatatatatattttagagacagggtctcaccatgttgctgaggctggtcttgaattcctggcctcaagcaatcctcctgccttggcctcctgagtagctgggattataggcatgagccaccatgcccagcttatctgagtatttctatgggatatattcctagacgtggaattactagacaaaagagtatttaaaatttttatctccacagaggctacatccgggaccagccatacccactcttcagggttttaatccatctattccactcgtgtaaatgtccctctgatcatgtcacctgcctcctggacacaacatttcactgtaattcaagatgctacacaagctgctaactgtattttccattcctcctctaaactcaagctcaacaacacctttatatctaggagtttttgctagggctgttctttcagccttgaaagctctgtgaccaatatcttcaggcccaactgcagtccactgtttgcaccaaataaaaatgataccttcatcatgaaaacatttttccgtgtaaaattcacgtttccaccatctcagctgctacagcactttcacctgtttttcacttggggcctgtaataacgttgtcttagaatttttgtttccatcaaaactttttgtgcgcagcattaagcacagtgtacaagattactaagatgtgtccagagaatggaagagcagtgcctttcactgacctggccgcaggtagaggtcggaggaagctgcagcaatccgttcccgctcccgctccttctcccgctcccgttcccgttccctctcagcacttgcagcagctgcaaggtgtgttgggtgtcctgtaaaacataaacctgcagcttaaagataaaaatatcaactgactgagtatatcaaacaattccgaaattctaagtgactgaaaatttttcaaaaagcttcaaatttgggatataagaagtttgttttggctgggtgcagtggctgacacctgtaatcccagcacttcgggaggccaaggcaggtggatcaccggaggccaggagtttacgaccagcctgggcaacatagtgagaccctgtctctactaaaaacacacaaaaaattagccaggtgtggtggcgcgcacctgtaatcccagctactccagaggctgaggcacgagaatctcttgaacctgggagatggaggttgcagtgagctgagatcacaccactgcgctccagcctgggcaacagagccagactctgtctccaaaacaaaaacaaaaaaaaaacaagaaaagagaaaaagaagtttgttttattaagagtcctggataagaactgaagcataacataagcttttaaggcattcctaaggtatctagtgacagctggcacataagaactactattaaatgttaaaagaaaaacaagaaaccaaatgaggaaaaattgcccaagataccttaaaaggctatgttgtaaaaatgtaaacatgatggttctattagagaggtgtgtaactgtacaatctcacctggagacatggaagcagagttgtacggcctgggagggaaagtaatctgtgtaccaggaatataagtgattctgtccatgggaggagtgcttgttccccctggatgaggcactaaaattgttggaggcatattggtcaggtcaatgattcctatccaaaagacaatacaatttatgttaagtgttattctaaaggtacagaaccatacatgactttggattttgtctatctctgtgaatcaagggtaatttgtacataatataaataaaaatgtttactatcatcattactttttaagacattctttaaagaaggatattaaagactgtacttcacatcagtaacctcaaagtatgggcagattaaagagagcaaatttgtaagccatggattacaaatactcagcacaaggatttggtttagttaatttcagtattcaccaaaacaccttgtctcaatgtatgtctctgggctaaaaagtctacgggaggaaggatatagtattcttttctttctttctttccatcattcattcaacaagtatttactgagtacctaagaaacactaggtaaacataataaattctacgaaatctgaaatgcaaagacacacacctctcgttgctgggtatgggagacccagtggctgctctcttggggagagtcctctggccacatctggacgcaagttcacttgcatctgttgtgaggtaatgtaatcatttaagattgtctgtcttgtgttctccattgcgtaaagctgatactgacttgggtaacctggagttggtgaaagctgtctctgaaacaggtaagcagccgctgctgattgagagaatgaaagaaaggcactgagttttgtcctggctgaaatacatttgctaaacaccacgtacaaaagagtagagaaaaatcacatgctgagctagtgcacatggaacttttacttagctacaaggattaaggtggatttattttagaccttgatgtattagcaatagcaattctaatgtctaagatgtaatggaaaaggggaaggataacagtagctaaaaacttctcaagtagttttactttcaatctttgacatgtaactttatcatatttttacctggcatctgcaagagttgtgtttgaaaataaaattgtctttatagtactgatcatccagtacaaccaacagaaatgtatacgaaaatactttgtggcaatcagtaactttactctccagggggtgaaaatgattatagactataagcatttaattagtccatgtgtttggagcagagattggcaaacttttgacataaagggccaaatggtaaatatattttaggctttgtgggccatttcgcatttgtcacagctactcaactctgtcactgtagcacaaaaagagctacggaaaaaaagaataaatggtgtggctgtatcctaataaaactttatttacaaacacaagtggcaacaggatttggccaaaaagctgtagtttttagcaacccctaggtgagagaatgacacaagacacaagatacgaggaaggggtaggcgtggtaaaaagtagataatgtctctctcctcaaaacattataatccaactcaggctcaaaaacaagcaaaagaaaccactacaaaatgaagacaatgataaacactaaatagaaaccagaaaaattccattttgtctgagaacttgagtgacctattttatatgtatatgttctccctagaaaaacaagtaacatgttttctggaatatttgcttccccttcatctagaagctaggtaagtctgtcagctgacacaatctgggagacagtgccctaagtaataggtattgggctcctctgaaacagtgttgtcaaatgacaaataatttgatggcatttacacagcttttagataaaatatttcccacagttactttcctattattatgaaatgtaaataacccttagaattcttacttttaaaatttagcatactgataatgaaaaattcttctctaaggaccaaagtgaggcacaagtattctgtgtcctaatttgcacctgaaggatacttattaagcaaagagtttatttaggccagagaagaggtctcagcagaaaacacatgtgtgactgggctcagccaatagcggcaaggaagagcaaggactgcaccctgggaggacaaggtgcagccggtggtcctgcagattataacagcccagccaagcctctctgtaccaaccgatgtgactgctcctctcccctccctgtgtaaaacacaatgccctctgcccagcagactgctctctagaaacctgcacatctgcacctatcagattctgtctaccaatgtcagtggtgttctgaagtttcttccagctgtacttgttactagaattatgtaacttaatgacataatttgtaaatcaaggaagaatgaagagtggtttctctgaaaactaacagctttggaaagagttgatacagaagttgaatcaggtgcggactagacaacttcaaaggctggaaaaaaaatctagaaggattctgtatttagattgcttggaagtgtctttacttggaagttctagctttacttaaaaaaaagaatttcttttatataagacagtgagacttaatcacttgtttatgaaaaagccttggcattagatcagagttctggtaaatgaacgtctatttatgctgtaagttaacatgtttaggtatgcctctgtcattttaaaataattattcacattaatccactttttcaactagtttcaccaagtgccatcagataagagagcttttcatatactattctttttagttctttaccgggtgctgataagattttatttcttgatctgggtgctggtaacatgggagaatttagtttgtgaaaattcactgagctgtacattaatgatatttgcaattgtactatattgtacaacaacagaaagctgaaaagtcatactggtggcatatttatttgccataaattatcactatattttgtgtttaccaggatccaaagccctgtgaaaaggcatggctggatccaagtgcgtgggcaggtggctccgataaacctcgcctgcagtgctgcctctgtgatggggatcaaacggactgtggctcacgacagggtccaccccaggcactggagacttcgctgggatactttccctctgggtaggggtcagtgtcgatttcctttcatgattggtagacttgttagaagaaattgtaactggaaaaaaagagccaatgccacaagttcttaagaaacttgcaagtatgataatatttgtccatttctcaaccattcaaataaagactatattcatgtatttggatcttctctttccactcaacatttaacattcaatattgcaaaatatgaaaatgtaaacaacatatgaaaatgtaaacaactagtagaaactgagatttggagagtactgtcaccttttggatcatagcaccagtattttaccaccttatgtaacattaaaaataaaattcaatactcttctttaaatctcattatgaatcattttgttttttgtatgactttaacattctaaattcttttgtccccacatgtagtaaacttcagttttctctcattgcctgtgttatgcaacctccttcctacccattaatcactagtttcactaattttttccttgctctgttcttccacaatgactttctcattacttcaccaatatctatcacctccctactccagcctctcttctcttaaatgatgttattcaggatggtcagattgtcccaccaataaatatatattcaaacacttattagccatcatcctcaattttttttttttttttttgagatagagtctcgctgtcacccaggctggagtgcagtggcgtgatcttggctcactgcagtctctacctcctgggttcaagcgattctcctgtctcagcctcccaagtagctgggactacaggagcgcgccaccatgcacggctaattgtttttgtatttttagtagagacaggatttcaccatgttggccaggatgggctcaatctcctgacctcatgatccgcccgccttggcctcccaaagtgctgggattatgggtatgagctgctgcacccagccaccctcaattttttttaactgtggtgaaatatacataacataaaatttacaattttagccattttaaagggtacaattcacagtggcattaagtacaagcatgatggctgtgtaaccatcacatctaattactaatattttgatactataaactttaccacaatcaaacaaatctgcctgcccaaagaaagaaatcacactggtttatcacatccccttccaagtcccagcgtgctcaaatatggagtgcccttccctctgcagggcaattcgccatcaaaactaaagctacaagcatttggactcacctccccatccctaacaaggacttccccttctcctcactctgtgctacgcccctcacacccgccaaaacacacttgtacagctcacagtgcccagcccaggacgtaccatgtgagccatcaataaatttgtattataataaaaaatggtaagtggatgcatttttaagggcctcaggttgatagggaccacttggtaaaaatcacttctcaactgatgtagctgccagtagcatggggttatagtgacaacaataataacaacagtaacaccaacaggaataattcacatttatcgagcccttcgtaaatactcggcaccattctaagttctttacatgtactaccttatttgatcttcataacaatccagagaggtaggtcttaatgttacattatgattttacagatcaggaaactaagctacaaaaaaactaagtaactcatctgagttgatgcagtaagaatgttaattcaagcttatgcagtcttgttccagaggctacttacagctttcacaccacactgccgctgaaggaacaatgtcaaaactgacttccagaaaaccttatgcaattggctgaaaatccactctaaaaatatacttactctatagcatttctggactgcatcataatctgcacttgatttaaatatcaggtattttacttaaattatgcctacttttaaattagtagccttccatactcctagactcaagcaagacctgtagatcttgggatactctaaagctgacaatttgatatttactacttgacaaaggtttttttttttttttttaaatgcaataaaaagtatcagaccaagcaacaaaagtaacataccatcagaagttctgttcatcatgggtgagcctctggacatggtgttttgataactcacaggggtcctccgtgcactggtgtcatcataaatcccagggctcagttgtgctttgggagcttcatgcagtgtggacctaagaacggaggggccagagcttaccactgacgtgtgccgggaacgcacggtctcgcctgctttcacatcctcatattttccccgttctaccacttttatgttctctggcacaatttccagcggaggcattccacgggatagtttgctaggccccgtgattaaggatttgacattgtgtttgatggcagattgacctgagttgttgtcaaactttattggtgtgccctaaagggaaagaaacaaacattacaggtagcaaagtcatctggctacttttctatctcaggtctatgtctggcccatggcagttacagttcactgtggtgatcttttttggtctgtttacaaatctcaatcacaaccccactgatcccaagctgcatactttcccacattccacactctatgctatagacataagaaaacctgatgataagaagtacacaaggccaggcatggtggttcacacctgtaatcccagcgctttgggaggctgaggtgggcagatcacctgaggtcaggagttcgaaaccagcctgaccaacatggagaaaccctgtctctcctaaaaatacaaaattagccaggcgtggtggcaggtacctgtaatctcagctactcgggaggctggggcaggagaatcgcttgaacccaggaggcggacgttgcagtgagccaagatcgtgccattacacaaaggccaagcacagtggctcacgcctgtgatcccagcactttgggatgctgagatgggcagatcacttgagctcaggagttcgagaccagccttggcaacatggcaaagccctgtctctataaaaatacaaaaattctgggtgtggaggtacatgcctgtagtcctagctactcgggaggctgaggtgggaggatcgcttgagcccaggaggtcaaggctatatagtgagctgtgatcacacaccgcactccagcctggtccacagaggaaaaaaaaaaaaggtacaggaaactttcatgtttacttccaggaggtctgacatcataagaaccacttataattattaagtcacacttttttaaatgttccataaatatcagttactgacaaaaagagccaaaacttagttacctgggaaatggaaccctcaattatcggccgtgtgctctggaccacttctggagttttccgactttcctgagttaaaatatcttgccttggaatctcatgaatggaacgccccatttctttgatggtggtgatgccatcatatggttttcctttggtaatggcaccttcaaatgctcgtatgggaggactttcccttttaatttgtttgggatatttaaggccatcttcaaagctttcagttgttgctcttggtgtcccttgaaaaagaattcaggaaacattaaaataatgctgatggttgcacaacaatgccacggaactgtgcacttaaaaatggttaaaatggtaaattttgttacatatattttaacataatttaaaataatgccttgacatcttgtagtttctaattaactttctgtttacagtagatcctcaaatcagtatttatcaatcattatttctttagggttgcttgagatatgatattaatgcatcattcataatagtcacagaatggttcttgcataataaagatatctctatattaaaagattaagcaactatcatcttccaataaattatgtagctcagaggcagaaaagtaataaccaagactttaatatttcaaaagggaaaataacttgaaaagcagaaatacactgtaaattaatgtcaaactattttgccagggaggcagttataaataaaaatgcaaaacaagcagaaagtttaccctgcattatggagccagacaatacagtcctttctttgaggtcagaatgaggactccccctgggtaatgctcggcatatcagcccttccaaaacaagaaagcaattcaattattcaacataatgtatatgtcaactcacatatactgaatgctgttcttaaagtctatgtttttgataaatgctctatgaaggaaggaatgtcaatttaagtttgtgaactatccagaagtacctaatatgacatcacacagtcctttgtaaatattttcctaaataaaaaatggccaccaaaggcatctaatgaaaggttgaaaaggaaagataccttcaaagttaaatctaaaatcccaacacttctttatcaagaggaaagaagatacaggattggaaaccattgcttagctttgaaatatacttgtgataaagggaaaacgggaaatatggataccataaaaatagggaaaatgtattaaatgaaacatgcaaattgaaacgaaagagttgtaaataacctcctaagaagcttcacattattgttgctgataaatataaatcaagggttagaaataaccacacatatttacagtaaaagtgtgtgtttttaacatagagaaaaatacagctcttagaaaattacacaggacttaccctgcttttagtatttcatctagcttaaaattggttgaggcaggttaagatttaaacaaagtgggccattaacaaaacaaaatcatactgatcatgtactgaagccatatcacatgagcagcaccagttcagacacctgcctctaaccctcacacagtgttaggtacgatcccttaatttacagaggaagaaacaggctcaaaggaattttaccagggaagggtgaagctgaaatttaaattcatgtctttatccattacaccactttatctgtctcacaattcaaaaagaagttctcataataaactttaccttttttaactcacttagctgaaacaggaataatctgcaaattgtatgagcattcaaatatgaacattctaatagtaacctatgatatgaccaattacgcttaaatttgacttccttccattgttatgtgccactttatatacagatataaacttaatataaatatatatttcaggtggaaatgacagaaattgcatacaacttaatataaatatacatttcaggtggaaatgacagaaattgcatacaacttaattcaacaatgcaaaattactatataaaataacatgtatcaaaataacattctgaaaacaatgctttaccctctaacggtgctgatacaggagactccctcattgacatcccttgctttatatttccttccactgattcatagcttctctttaaactgatttcatgagctgttcttggactcctagtcccttctcgggcattcttaatatctacagaatacacaaacaagacttgctcagacggagcacatggtatacaatgtacagtaaataggttagtttcatagtctatcttataaaaataataatattaaaacttgtcttaacctacaataaaatatgtgtagatgattcatgaaaatattttcactcattcaaatgtgtttattgatgcctactgtgtgctaggcataagctaggcttgcaggtaagattaacaaattaagtccctttctgcatgaaacttacacaataatgtaggtacagattatgtagtaaaataagctatgaaaggagaagtataatgtgctatgaaaatgctaggagagaaacctaacacctccaggttcagataagcctgctcagaggaagcaatgtgtaagctgagaatgaaggatgaataagagttgttcaagtcaaaggtaataggaggaaaaagtacaggcagtgtgaacagtgaacacgaagaccccaaggtgagacagagaaaggtacaataaaagaacgtaagcgtggtaaccggctaatgtgtagagtggagttgggaggaagagtgtgggggaggtaaatataggggactaaagggaaaagtgagaagggaaaaatgtgaagagctaagctgaaagcagctcctggaggggttataaagctaaggtaggggtttgcagttatatccagggtgatggaaaaatcagtcaaggagtgacgtggtacacactttgaatatgggtgagactgaaggtagggagatgagttaggtggctgctgggttaaagatgatggtgacagtggtgaatacagagtaatggatggattctagacactttaggaaaataaacagaaatggcttagtgatttggtggatgtggaaagaaacagaggtgtgtagacttctgatatggacaacgtacattattaatttcttaaccccaaaaacaaaatgtgaatcataatatgccagacgtgtaaaggagagtgaaataagaatgctatcaagcattttgcagcatctggcactatgtacgcacatactttatttctttgtattggaagagaaagcatagctcatgactactccaaggtcacagagtcaggtgcaaataagaactcaaattcactcaaaactttggctaatatttctatcacatttgagtcattcttataaaatactactactgagaaaatataacaagaatacatctaaaaaaatgtacatagacattaaaatagttttattaaggagtatttaatattatcaagattatcagaatattatctaccttctaattctttttgtttgtttgtttgagacagactctcgctctgtcgcccaggctggagtgcagtggcccaatctcagctcactgcaagttctgcctcccgggttcacgccattctcctggctcagcctcccgagtagctgggactacaggcgcccgccaccatgcccggctaattttttggtatttttagtagagacagggtttcaccgtgttagccaggatggtctcgatctcctgaccttgtgatccgcctgcctcggcctcccaaagtactgggattagatagtagataggcgtgaaccaccgcgcccagcctatctaccctctaattcttaattcataaaacatgaatctcttcaaaataaaagtattccattaaagttcaacaaaggctctttacctaagctaaactgactgaccacagtcgacaatcttagctaccacctatgggacatttaatatgagctctgcgttgttaattactttttatcgactaagctgttattcacaaaattctcatgagacaagtattactaaccccatttactgagagaaaacataggctcagcaaagataaactgactcccagagagcagaaatgcgggaaaacccaagcctatgtttttagcacatattgtaatactggctttggtgcatacatacaatacttactatcatatgacaagatatgtccacttttgccttcataaataacatggcctttggatgcagcttcctctctgcctttctcaggactgctgtcttcaatgggcattctcgaaatggaccccttcaccaaagcctctgttggtatgccagtctggggcagagccggggtgccctgccatcaaatcaagcataaatagcagaggagtcactcgagtttagggaaaacacaagatgctcagaaaatttaacctatgacagagtcaggctaatctatagcttcaaagaagaaagcacacatacatgaaaggaaattagacattgaatttttatcaacatgaagacatcctgtaccttcatccttcaactcagccacataacacttaaaattatgacacgtacattaggtgaatcaactttgctctcaccttcatgtgaggactctattacaggatttaactctcagaagtttctcttaaggactaaaatcaagtaaatgtaacagcttttattaggttgttgcaaatgtaattgcagtttttgcgttgttgaaatttgccgtttgatactggaatacattcttaaataaatgtggttaagttcttgttttcttctgaatgtagttacgcaatatatcattttaatgtgcatttgtcactttttttgttaatgacttattacttggtgttttatatttattttagacgatgaaaattatgttatacaaaaagcaaattcaagtgattttcttattcaagttcaaaatgggttgtaaagcagcagagacaattcataacatcaacaacgcatttggcccaggaactgttaacaagcatacagtgcagtggtggttcaagaagttttacaaaggaaacaagagccttgaagatgaggagcatagtggccggccatcggaagttgacaacaaccaattgagagcaatcattgatgctgatcctcttacaactacacgagaagttgccaaagaactcaacgtcaaccattctacggttgtttggcatttgaagcaaactggaaaggtgaaaaagctcagtaaatgggtgccccatgagctgagcgaaaattttaaaaactgtctttctgaagtgtcttctcttattctaggcaacaacaaaccatttctcaactggatcatgacatccgatgaaaagtagattttatacaaaaactagcgacaaccacctcagtggctggactgagaagcagctccaaaacacttcccaaagccaaacttgcaccaaaaaaaggtggtctgctgccagtctgagccactacagctttccgaatcccggcaaaaccattacatatgacaagtatgctcagcaaatgaatgagatgcactgaaaactgcaatgcctgcagccagcactggtcaacagaaatagcccaattctccacgacaacacctgtgtcacacaaccaatgcttcaaaaattgaatgaattgggctatgaagttttgcctcatctgccacattcacctgacctctctctctaccacttattcaagcatctcgacaactttatgcagggaaaattcttccacaagcagcagaatgctttccatggctggctgtggtggcttgcgcctgtaatcccagcactgtgggaggccaagacgggcggatcacctgaagccaggggttcaagaccagcctggccaacatggcgaaaccccatctctactaaaaatacaaaaattagccaggcacggctgcgcacacctgtaattccagctacttgggtggctgaggtaggagaatcacttgaaccctggaggcagaggttgcagtgagctgagatggcaccactgcactccatgctccagcctgggcaacagagcaagactctgtcaaaaaagcaagcaagcaaaaaggaaggaaaggaaaggtaaggaaagggaaggagaggagaggggaggagaggggaggagaggggaggagaggggaggagaggggaggagaggggagggggggaggagggggaggagaggggaggagaggataggggaggggaggagaggggggaggggagggggaggggagaagggagggaaaagaaaaggaagggaggaagggaggaagggaaaagaaaagagaaaagaaaagagaaagaaaatgctttctaagagtttgttgaatctcgaagcatgtatttttatgctacaggaatgaacaagattatttctcactggcaaaaatgtgttgattgtaatggttcctattttgataaagatgcgtttgagcctagttataatgatttaaaattcacagtccgaaatcacatctttgcaccaacctaatataaattttctaataaaaataagatgataaagtagttttaaatttagagtactacaactttttctcaaattgtgatatgagggaaaaataactttcaaatatcaaactgactactaggttgttaggcctttggatgcctctgtgttttgacactgattcagtttaggtcaggttatctatattttcaccatcatcaatcctcctctggagttgccaatgaccatgattctttttacccttcctttaagcagcgagcccttccttcaaggaaaattgttcatagaatctaatacgtagagcattttgcaagagagagcagcttggtgtaaaataggagttagaggcctagactgagtttactcacatttagggtcaccactatactctgaggactgctaaaaccctagagagcacaatctgataccatatgcttaagaaaagcgataagagacatacacttacttgtccagtcattaagtgaactcattagtaagtgtctagaaatccttaacgcccacttcagaagtactcatgtcaagtgcacaaacagattttaaacagataaaatttagtctcctttggcccagttcatactctttcttcccacagtttggatgccagagtgaagagaaagaataatacatacaggcccatttactttcctctgtccatattaaagtattagcttgctgttaaaacagaaacacactgacccaatataaatggagactttttttttttttgagacggagtctcactctgccacccaggctggagtgcagtggcacaatctcagctcactgcaacctccgcctcccaggttcaagtgattctcttgcctcagcctcctgagtagctgggattacaggcgcacaccactatgcccgcctaatttttgtatttttagtagagacggggtttcaccatgttggtcaggctggtctcaaactcctgacctcgtgatccgctctccttggcctcccaaagtgctgggattacaggcgtgagccaccgcgcctggcctaaaaagagagattttaagagtcagtatgtaactttcttttcttctgtttttaacttaaccacaaggaagtagtatgtaaactacatttcagaaagaaatcacctgggaacctcagtaaaatggggattttaattcacatgatctagagtgcggactgacatttctgcattattctagcaagcatcccagtgatgccaatgctctggtgcacaaaccacacttggccagcaaagccctagctgaatcagctaagggcttgggaaaacacagactgccagtccccaccaacaagggttgggtttcagtaaatctggggtaagatctgaaaatttatatgtgtagcaattttctaggtgattctgatgctcctggtgtggggatcatactttgagaacaactgtcttagaggatagtaactagacaaataaaaaacttgtgacaatgagtgaacactttagaaaatgcaaggcacaggtttctgtttacaatgatttcccaaaacagaattttccctcttatgcatatacataaagaggctaagaacttcttaagtatcaagttaaaattaacaactaactgagagaaattttattaatcaaaattggtgatgtatttagcccaaaattggaaggcttctggtgcttttgttaataccatccacatttcctggtttagcattagattctaacaaggcagcccacatactgagattctacaactacatctccaccagggcaaaagtaagcaaataattcgtaatgattttcttctcaatttctatttaggctaaacacatggtaaaagcttttccaggaagacaataagagctgcatcaattagaacatatttctttttccagtttgcaaataagtgaccttttcaaatgaaccaaagtattcataatatagcttgtagtcaaaatgatcacattaacgtctctgtggagacagtttgcagatctaggttatgagacccagtcccataatgcagaaaaatgaacttaagccacaaaatagccaaagtgctaagaattatttatcattttttcctgagcttctgttgagtatatcagagatgatcgtgactaacctgagtgatagagccccgtagggatggaatgctctccactgaaattttgctggttggagttccccgagttatacttccttcttgtatggctcctgcggtacctgaatacaaacaaagctattagcaaattacacccccagcccctgccccaaaacataaaaaaacagcccctacttgggagagtactcaactaagaagaaaagaaaaaagcagcacaaaacccatcatgtttgttttattaaaatgtacttccaaaataatactaaagaactgctgaaacatggaacttcaaggttttaaaatgacttttacatggaaagaaaacaaatttagaatttaaagactatagttaaaaaagcccatcattaaaatatattaataacttactttaataaatttattggggacaaaagtttaacatttctgccaaccagcatattttacctctgactacaccttcatgttgggccctgaccaacagaccctcaggttgtgagttttggcttcggggagaaaattcttcctgcttgatgtagggcaaagtagctgtggaaaggcagagaaacatgaaacaatccagtactaaattactggctgtgatgctacaaacgtagatgcattatgactgtattaactcactgacctgatttggcagattcctgttgccgtggcagtccaagagagatagatcccactgacggcttgggtgtttcttgagtgtaggaagcctgattatgagaagtcaaataagtgcctggtgttccctaagaaaaaaacaaaaaaaaatttaaagattaagcaaacattgtttttttcacaaggtcaatttcacaaagtcagcattcccatttctgtttaaaaaaaaaaaaaattataccccttctacccaaaaccaagaatagtttttgtaaagcaagaaaatcttcatcgtagattgcttaaatataaaaaaaattttaaagggagtaggatatgtcttctaaaattaccatacattacatgtaaatagtatttactattaataaattacataaataaagcacttatatgttgcaatcaaaatgtaagctactattattaatattcattccgactaaaaatgctatggagagtggtatcagcaaatacagcaaagtaataaggacttccaaaaactctcttccataaaagcaacaagaaaacctggaaaaattttaagaatcaacctttttttttcttttcttttcttttgttttttttgttttctttttgtttttttttttgagacagagatttgctctatcacccaggctggagtgcagtggagcaatctcggctcactgcaacctccgcctcccagtctcaagcaatgtaagaatcgacttttaaagaaccctggaaattaaccaaaggcttgtagaaatctggaaatatttatttaaaaaaaaaaaaaaaagctgaatctaggtaaaaacaggtaaaaacaatgggctttgtggcattttaacttgttccattctcattctcctgatcaaactctatggaagtgttgaaaaccaaaagcactcaatcatagtgcaaacctatggtggctgcctggcagccactagaagggaaagagcaaggatggagctccttaaaagcctcattcccagataactgtcattgtttgacttctctgttggttctctgggagactccattcacaaagctgtctttatttgacctgactggagtgggagaggaggtgcagacttgtcaaaaacaatcagaggcaactgattaacttctccactgcctgagacagtagataacagccagggtaaacaacaggctaaccaaaacacttaaaaggaaaagccagggaatgagatgttcatggggtctgaaaaactccaacatattccctagaacctagaatgctacatgcatgtgcaaggctatgaatatgcctaggaaagacatgggaaggccccactgctctcaacttaggctgcccttaaggctctgcacgccaggaagtaaagactaaggcaaagctgttaagtgcccaacacataaagagcacccctcagcaaaggctgattttactgattttagacatttaaggaaatgtctgtctaatcattagctgatcactaagttaatcagacttcagtggctacacacaacaaataatacagactttacagaattagttaagaaaagtcactaagcaaataataacagccaaaagaaacaacaagctctgaaaagaaaagtgggggtgggggggatccaagttccagagttgctacattatacaaaatgtccagtttttgaccaaaaattataagatacgcaaagaaacatgaaagtgtgagccatacatatgaaacagagcagggaacagaaaatattcctgagctttgggctcaggaataaagactttaaatcagctattataaatgtattccaagaactaaaataaaccatgtctaaattaaaggaggccaggtgcagtggcctgccttctttaatccttacactttgggaaacccaggcaggaggatcgcttgaggccaagagtctgagaccagccttaacaagatattaagactctgtctctataaaaaataaaaaaaaaattaaaagccaggcatagtgatgcatgcctgtagttccagctactcaggatgctgaggcaggattgactgagcccaggagactgatgctacagtgagctaagatcatgccactgcactccagcctgagcaacagaattgttttaggagagagaaaaagaaaaaaaaaaagaagaaagtacaagaatgatacttcaccagatagagaacaccaacaaagagaaagaaatcattaaaaagaacaaaatagaaattctggagctaaaaaaatataagaactaggggtgggggtgggtctcagcaaactaagaacggaaggaaacatcttcaatctgatgaaagacatccatgaaaaacttaacattctgcctaacagtaaaatactgaatgccttccttctaagatgagcaacaagaaattcatgtccatgttcaccaattcactattcagtattcctgtatcaagaccatcctggccaacatggtgaaaccccgtctctactaaaaatacaaaaagattagccagacagggtggcgtgcacctgtagtcccagctacttgggaggctgaggctggagaattgtttgaaactgggaggcggaggttgcagtgagccgagatcgtgtcactgcactccagcctgggcaacagagcaagactctgtctcaaaaaaaggaaaaaaaaaaaaattcctagccactcggaaggctgaggtgggaggactgcttgagcccaggagttggaggctacagtgagctatgatcacactactgcaaagcaagactttgtccaaaaaaaaaaaacaaaaacaaaatttaaaggaatcaaatagccaaatataaatcaaacaaaacacatacaaatctctaaagtgaaaactttaaagcgctgctgagagatatagatatacaagttcatagattagaagattcgatgtaagatttccatttctacctcaaattgatctatagatttaatacaatcccaacaaaaatcccagcagatgggtggttcatggtttttttttttttttggtcttttaaaccttaaactataatttgaagcattctcagatgtttggggggaaacatcctcgtaaaatagttccctatgctcgccttctggggaggcagtgctgagcaggtgaatcgtaaagcatttatgcatatgttaaatgctcactgcacccacctcttccccacaacctttgcctcttgggtggtttgtgctactttccccttactttgctacatttctacagttaagttggttttacttaaatgattcatgtttggggggggaaataaacatcacccttaaaacatgtttcaactcctgcaaataaaataaatgaagtggcgaaagaaaagaaaaaaaaagagaagagaagagatcccagcagaattttttttctttaagtagactgacaaacagattgtttctgcctctgctgctgccaggtgcccatgaaaaagtgggggcaaaaaaagaaaaaaagcaggttctgaagtatacccttgactggatctaccccgcagatgatgctgccaattgtgagcagtttctccaagacagaattaaagtgaatggaaaagctgggaatcttggtggaggggtagtaactattgaaaggagcaagaacacaagcaccgtaacttctgaggtgcctttttccaaagggtatttgaaatagctcatcaaaaaatatctgaagaataagctatgtgattggtcgtgcgtagctgctaatagcaaagagaatttcggattgtgttacttccaaattaaccaggacaaagagaaggaagatgaggattataactcatttacctggaatgttttgtatgagttcttgaataaaacttgggaaccaaaaaaaggggggagacagacattgataagctgattatataatttatatgaaaatgcaaaagacatcaaatagtcaaaacaatcttgaaaaacaaaaacactgaagacttatactacatgatttcaggacttacaataaagctacagtaatcaagactgtggtactgacaaaacgatgaacaagtagatcagtggaacagcatggagacagtgcagaaacagacccatatatactgtcaaatgatttctaacaaaggaactgaagcgatcaaatgagtaaaagacgtttcaactggtgctatttttcaactagaaatttaaataaagatgaatgttaatcctgacctcatactatacacaaaaattaatttgagactggtcacatgcctcaatataaaagccaaaattataaagctttcagaagaaaacacaggcgaatatctcacaaccttggagcaggccaagatttcttagcaaaataaaactaatcataggagaaaaaagtgtgtatatatatttagactatataaaaatttgaaacttctcatcaaaataccagtaagaaaataaacagacaaaaaacagagaaaatatttgtaatacatatatctaacagagaactttcaaccataataaagatctacaacacagtatcaaaaagacccagtagaaacagataatcagacttaaatagtcacttcataggtgtacaaatggccaataagcacatgaaaagtgcccaacattgtttgttttcagggaaatgtaaaatacaaccacaataagatattactacacaccaagtatgactaaaatgaccaagacttgacaacagcaaatggagcaatcacgtctcatacattgctagtggcagcataaaattgtagaaccattctggaaaagtataaaacatacacaaacctagtaattccactcccaggtaattgtacaagaaaaataaaaacatatgtccacaaagaacccattacaagaatgaccagctttattcatagctgccaaaaactggaaatagctcaggttttcatcaacaggagaatggataaacaaactggtattactcagcaataaaaaggaagaaactactgattacataaaaccctggatgaattccctaaaaccattatgctgggttaaagaagacagacacaaaagagtacaccatgtttgattccattcacaggaagttctagaaaaggcaaaactaatctacaacaacaggaaatcaaatagtggttgcttcaggcagtggaaggggagatggcctgggaaggaacatgagaaaactttctgaagtgatggaagtgttcaataagttgacaggggtgtgaccactgatgtacagttagtcaaaactgatggaactgtgaagaccagaccatatctcaattttttaaaaagtaatgaaccagaaaaaagatttagtggccaaagtcagaataaattataatactaaccacctacaatttaatattttgagcctttaccatatgttagtgaacaaatattctactgtttgaaactaagtttaaaacttggtaagtttagagtgatgtaaattaaaccaagtggtatgccaagtgccaagtgtaattaaatgggtggtatgttatgaccactcaatctgggtacataactcactgaaagttctgatttgtggcaagagtacagtgactgctgcatcttctggtcattatctcttgaaacttcatattcagacagattattatttattacaactctgacaaatcagtgcgaggagggaggacaagttttaacaaagccatattcaacaagaaatctactgtaaagagaagtcgtttcacctgtgagatggagcctcccattataaaagatggtttttctgaagccactgtggttttggatgacgggatgagagggggcggtggcctggttggtcgagttgtcggaagccgaacgccttcagggagattagttatcacttgatgtggagcaggctgaaggacttttaaaaggaaagaaaaatgattttaaactagtccatttcctagtttacaacatgttacctctctcagtcattcctgaatttttaaatcactaattaaaaaatgtaagatgaaaccaacaatgaacatttctattttaaatttctcattcacgtaagcctgtatacatatttgtcacaaatactatttgtggggttgaaatattcaactccctttcaaaccacagctttcaagctgatgcttatttcaaacttctgcttagcatagcaaacatcagtcttcaaaaattttttctctctcgccaatcactcttagggtacttcttaaaaacagctgataacactacttcagagaatgcgcagacatgactgacaaccagttatacatcctttttgcatcttgcatattgagaaacacttactgattctggctctcacagaacacttgaattttggggatggggagatctcaagacttttacaaattcatgtactcttcttaaaggaagagccagtcaatgtcacagtataaatgtgtgaacacaaatttcccagtggcccagtgaactcaactaaatacaactgatgatggaacgcagagaaacaaagtcattctgaaacagcaaggacacgtcctggaagagcagttcattcacgagattaaaccacccacgtggaacatctgtgggtggatggccagcagccactgcacagaggagtgatatttacctggcgggacactatagcgggctgcactcatatcaggctgtggagcggctttactgacttctcttggagaaagcctacacggtgaggctgaccttgctgcagtattgtgcatctgtgcttcctgttctagagcacgtttgacctcagcataaggcatataggcgactgattttcctatgaaagttaaagttatcaaaataagggaagaaccccaaattaaaatagtaagtgtgaaaggaccaagcccacaccatccaggggctgatccgactataacattaaagtctaaaactcctgggggcaaaattcacccacagagaagttaagaaatcctgtaaatctaaatctcctgtgtatcctcaaaaattcatttacgagttttccctttaaaggaaaaagaacttctctttcctcttaaggagaatcaagtgttttcacatgcaataaaatcacaacaggcaaacatcagattatcaagcaattctgttaattcaaatctggcctgactggaggttattagctttgcgaggatttcacaagtcttataattagcctgttgaagctcactccttgctaatattcacagaaatatatttaattaagaaatggaagaagcctttcaaaagatgcagatcaaactaattcaaaaatcctacataagcttataaaaaccatgaatataactacaataatactaatgaaaattacttctcatgtaagttatctccacataaagcataaagaaactttaaatattttaaagggcacgccagaaatgcagtcatatttaagactttaaaatatatagtttctttttaaaatgaaacatctgtaatttttgaaaatcaaaaaagcacaaagtaaaactcatttgtaaccctgaccacttagatttgtagcattttaatgtctgtcagaataaattcccactcattttatttattattttcattacctagttgtatccatttatctttccaagtaaatctaaatttaaaatcattgagtacttcctctcaaaacaaagaataaatagaattttcattagacttgtattaaatttatgaataaacaggtgatgatattttataataatgagttttctagttgagaaatcttgtttttgtcagatagttccatcccttgcttgttaaaaattattcctagatatgtcatattggtaagaaaaccatctcttttatatatatgagtttatataaataaacctgattactgcagacatacaggaaagatgcggatttctgtgtaataattttttctgaaaaacctaatgaactttccttttagctctaataacttttcagttgattcttttaggctttctaggtgaataatcttatcctgtaaataatttgtcttttcccttcaaatacctaaacctcttatttccttactacactatcttttgtaaggtgcttttaaaaatcagaaacaattacaaaaatatcaactgatattcaagtgctaggcagtgtgcattacatacaatatctatttagccctcaagaccaatgtgattattaataccattttacagatgaggaaactgaggctcagaaaaatcacatctaattgcccaatcaaggtctaccagcgatttttttaaaagcagtataattccggaccgttagctctaaaccacagtgcaatagtgtctcactaaaggactgggtgtggaatttcagatgtctctggtgtatccatcaagacgatggtactttttccttctttgacatattaatataatgaattagagtaagtgtcctaatactgagaaaacagatttatgaaataaccaactccaaaagaaaatcactttcctagataatttaatatgataatgtattaaaaatccaatgtctgattattttaccatttccagtaagtttataactatgtttaaaaaaaaaaatccactggtcatagtagtggtttttttttttttttaaatgatggaaattggatggttctaaacacagctatctacatcaccatgtacccagagcaggaaaagaaaaacagcaacagcaacaaaataaacatgcaacaaactagggtcagttacatagaagcattaactcttattttaattggataattttgttaaatttgcattagaagttcaattctaactctacctccatatgcttaagtttgagttccttcactgtagaaaagaggcttaaaagttatcagtaaagcagaggtcaactcgtataaatgttactggtaagtgaaaacaattctctaaggttttttttcaaccttttctacagatgggaaaagctttaagcaacttaaaacaggcatacctacagtaattatttataccattcacattaagagaaataaatacaaccaaatagttggacaacaagtgctgcctgttacttgctaaaagagaccatgaagggaaaagtaaaaaccatggccctaattcaggtggactgtaccaatatttggtgatactttatacataaatccatactatcactattcttcacattctataaactgttctatgaggttaaatttaaaccatttttgtcaaacattctagacacaagcatcttaactgcaaacatttaaatgttatttgaaaggttatcctatacactgaactacaggatagactcaaggaaaaacttctggtacttgttaaacaaattacaggatgaatacactagggagattagctaaaacaaaacaacctttggataaacttgccctactttgtagagcatcaccttcgaccaaactgtaaaattcttaatgtcatactaatcaaaagtataattacaatttgattttaagatgactgaattatgattaaaaattaggataccactgagatctaaaccacgtgtagtaatgtgactaacacagagaaatacaattcacagtttggagtctcagaatttggggctccagcctggttcagtttcttcagttcccaaatacaactcattttataaagcagaccaataaaagatattgaggctttaaaattatgatatccatatttaaatgacccagatattactaacaatgatgttatgccttgtcataagttcaacaaatgataccatctgaatgtcatttttctaacttttactacttcttcacaaaatctatcctaaataataaatgtaaggaatacatccagagacttttattctctaaagtttcattttccactgacggatttcctcataattcgaatgttcaaaagacaaacacctgcgatgtccattaataccctgtagtgaaacacgataaggatatctccattatgtcattcatttataattcattcctttaaggtgtaattactgagtacatgttgtgtcaattacagaactagcgattaagaattccctagacccaacagagtaaaagcctaaaagttatcaatatttctaccttcattcaaggaaatattcatttagcgccttttatattccttggtggatattatcattctggttcacatttttcctagcacaagatttatgtttaaaaattaacaagtttaaatttaaaactctaacataagaggttcagtgtattaggcaactaataactcaatattggtgtgatctgggcagagtcagcaggatcagttaagtaccacagttcctattttatattaaataacccttggaatgcatggcattgtaaagctaatagctcttatttagctaaataaagtactgtaaagaatcttctgaatcattcagactatttcagtattctgatattctaagcatatcgtagcatataagtagactataaactcattcttaaccagaaacatgtgccaattcttctaaccatgtcagaagaatgtattaaaacataaaaaccacccctttcttctttttttaaagaaagtaaaagtgtatcacacaccaactaaaacagcaacggaccaactcaaatccatcacttgaaataaaaacagtgatgtaacaatgaaaacaggtacctccatagtatctactgtgtatatacagtactaatacactaattaatatgtaataacgtgctacattatacataaaataatgcagagccacctgttatataacaataccgaatgctccttccttaactttacaaccacagcaaggtagacgtgtactattattttcattttacagatgagaaaactaaagctatgaaaggttaagtgacttgcctgtggccacacagctggcaaatgccaaggtgaaggcttagccagcgtctgattggaaatatccactacacaaagttgtgtctctcatctaccagagaatgtgaatattacactgtaatacttgaaggtgatttgcttcaaggacaggacaacaattctcactctgaaaattcagatgaacggaacataaagcataactttatttataatgtcttccagcacaaagatgaatatcagaaaattcacattaactagaatgctattaaaaatgttactggcatcctttagtagttaataatactaacatttcttcatagtttaaggtcaatttaaggaactgtgtctgttaggacaaatataataatcagttgggaggctgacaacttacaaagcacaatggacactgcttttgggtttagctttatttcccttcataaaagttctcttggtgatagctctatctacctaccttcccactctctgtttggactcttggatgtgccacatggacttgtagaacttctacattccaaatctatctgttcttgtctctgccgctgctcctccaggagtgctgactcatgcattgctttaatgtgtcgctggtagagagcatagccgctcactggggttccaattggtatgttacatggggtgcaggatacctataggaagaaaataaatcgaaatatgcaaacaaccaatgtaataattgccatctcttaacaagtaatgtaatgcttatttctgtcatgttattggttgaattgattttatcattttttaatcaaagttatcttcaagaataatgcttaaggcattgcagtggctcatgcctgtaatcccatcactttgggaggccgaggcaggcagatcacctgaggtcgggagttcaagaccagcctggctggtattttgtatctttgtaccaaaaatacaaaaatttagctgggtgcagtgaggcatgcctgtagtcccagctactcgggaggctgacacatgagaatcacttgagcctgggaggcagaggttgcagtgggctgagattgcaccactgcactccagcctgggcaacacagcaagacctagttttctttcagaactgatcacaatataaatcacacaagctgtaataacagaaatcaaaaatcagaaattacaacacatctgtctgattctaatttatggcagccaagtcccttgtggccctaggtcccatccctcatctctctttcaccagggatcagatccatttatatatatatatatatatatatatatatatatatatatatatatatatttttttttttttttttttttaagacatagtctcactctgttgcccaggctgcagtgcaatggtgcaatcttggctcgctgcaacgtccacctcccgggttcaagcaattatcctgcctcagcctcccaagtagctgggattacaggtgtgcaccaccacacccaactaatttttctattttttttttagtagcgaaggggtttcgccatgttggccaggctggtctcgaactcctggcctcaagtgatccactcacctcagcctcccgaaatgctggaattacaggtatgagccaccgtgcctggcagatcacatccatttatgttgatttaaatgtcatccatttgttaatgattcacaaattttctacttcctcaagacactttctccaagttccacacttacataaaatggcctacctaacaactccacttgggatatctcaaggaagctcagaacttatgttaaagggaacttcccatttttgaaactccattcttcttcagttgctctccattttagacatggaaccccaggtgcttcagccagaaacctggcagccatccttgactaattaatctcctcctctcccacaaccaactcattcacatagccattcccttaggatagaaatggactgttccttaagataggccatccataaccatccaataaaacatggtgataccctccctgttttccttctcattgaggcctgttcactgctttcacagtacacagtatttgccagtttgaaactgttttatttttctgtctctctgactttatgaagaaaataacccaagatgttttgtccaatacttaaaaaaatagcccagaacacagtccaggattaaatacctcatgaataacaaatatccctagaaagccctagaggtctgacttttttttagaatctggtaacttaagacttccatagtttttcccctagcgtaagtagtattattcactgatcctaaaacccataactttcttgcctttgtgctttgtcttccatataaacatagcttttcctccttttgctataacgccaaatgagctgttttgatccaatgaaaatattatttcttatgcagtcttctgtaagtgtctaattaagaagacactccctcttctccaaaacatccatagtattttttaacctaatagagcatcgcattttaattcattttaacctttacgataattttttttaatgccttttttttgagacagtgtctcgctttttcacccaggctagagtgcagtggtgccatctcacctcaccacaacctcaaactctcgagctcaaggaatccttccacctcagcctcccaaccacaggcgcatggcaccatgcggagctaatttttttttgtttttttttggagagacagggtttcgctatgttgcccaagctggtcttggaactcctgcggtcaagtgatccacccacctcggcctcccaaaagtgttgggattacaggcgtgagccaccacgcccagcctctttgccttattatgcagaccggtccatacgttttttgaaatcagaggctataatatataaatactctccacaatattaagaacattatcttaaactaatcactcaataaatgtccatttgaatgagtcagtgaatgaacaaatgtttaatgatctttttgtggtaagtacacaattaaaaacttttaccacttattatttgagatagaaaacacatttttgaataaagcaagagctttaaatatttgaataaatagaaaataactaaagaaaagaacaaggtcattttctggtgcctaaagaaaaattgagagtgttggaggtgttcaaacaagagtgactccggctcccctcccctctcccctctcccctctctcctcccctttccatggtctccctctcatgccgagccaaagctggactgtgccgctgccatctcggctcactgcaacctccctgcctgattctcctgcctcagcctgccgagtgcctgcgattgcaggcgcgcgccgccacgcctgactggttttcgtatttttttggtggagacggggtttcgctgtgttggctgggctggtctccagctcctaaccgcgagtgatccaccagcctcggcattctgaggtgccgggattgcagatggagtctcgttaactcagtgctcaatggtgcccaggctggagtgcagtggcgtgatctcggctcgctacaacctccacctcccagccgcctgccttggccccccaaagtgcagagattgcagcctctgcccggccgccaccccgtctgggaagtgaggagcgtctctgcctggccgcccaccgtctgggatgtgaggagcccctctgcctggctgcccagtctggaaagtgaggagcgtctctgcccggccgccatcccacctgggaagtgagcagcgcctcttcccggccgccatcccatctaggaagtgaggaacgtctctgcccggccgcccatcgtctgagatgtggggagcgcctctaccccgccgccccgtctgggatgtgaggagcacctcggcccggccgcgaccccgtctgggaggtgaggagcgtctctgcccggccgccccgtctgagaagtgaggagaccctctgcccggctgccaccccgtctgggaagtgaggagcgtctccgcccggcagccaccccgcccgggagggaggtggggggtcagcccccgccaggccagccgccccatccgggagggaggtggggggtcagccccccgcccggccagccgccccgtccgggagggaggtaggggggtcagccccctgcccggccagccgccccatccgggagggaggttggggggtcagccccccgcccggccagccgccccgtacaggaggtgagggtcgcctctgcccggccgcccctactgggaagtgaggagcccctctgcccggccagccgccccgtccgggagggaggtgggggggggggtcagccgccccgtccgggagggaggtgggggagtcagccccccgcccggccagccgccccgtctgggaggtgaggggcgcctctgcccggctgcccctactgggaagtgaggagcccctctgcccggccaccaccccgtctgggaggaggtacccaacagctcattgagaacgggccatgatgacgatggcggttttgtggaatagaaaagggggcaaggtggggaaaagattgagaaatcggatggttgctgtgtctgtgtagaaagtagtagacatgggagacttttcattttgttctgtactaagaaaaattcttctgccttgggatcctgttgatctatgaccttacccccaaccctgtgctctctgaaacatgtgctgtgtccactcagggttaaatggattaagggtggtgcaagatgtgctttgttaaacagatgcttgaaggcagcatactcgttgagagtcatcaccactccccaatctcaagtaccagggacacaaacactctgcctaggaaaaccagagacctttgttcacttgtttgtctgctgaccttccctccgctgttgtcctatgaccctgccaaatccccctctgcgagaaacacccaagaatgatcaataaaaaaaaaataaaataaagaaaagaacaatacccaagattggaattcagtatcaaaaatgagtcaaattttacagattattaaggtaaaatataaataaaatatacttgaaatctgtagattattaaggtaaaatataaaaataaactagacttgaaattgtatactggagttagccataatctctacaatttattctaactattcaaaacctaattacatgcttaatgctactactgttttatggctccttagtgctgtggttacaaacaaaaacaggacttactaatatttatggctagagcattatatttctttttttttcttaactggaaatgaccgtttcaatcaatcatcacaagtcatttgaaaaagcaatgtactaaggatataacctttggttatctcaaagagtttactcaaagttagactcagcatcttcctacccttctctcccatatgtcttagcactccctaacccaagcccagcacaagaggatgtaagaaaaaccaaggtgctaaaatcaagggctgaccatacaggtactagtcacaatagtccagaggtggaagcaatccaaatgtctatgaatggatgaatgaataaaatgtgatatacagatacaatggagtattattcagcctttaaaaataaagaaattctggcacctgctaagtatacctggaggacattatgctgagtgaaataagcctatcacaaaatgacaaatactgtatgatttcatttatatgacataatgtggcacaataaaaattaaatatttggtccttctcccaaagactttttttgttccaaatccttagaatttccagagcagtaagagtgtcttttgtatgctaacaagatgactcctggctggggcctctagattgcctcaggataagggctgacagcccaaaaaaccacaaggcaggaggctagaacttctttggggattggggtaggatgtctcttaatattttgcccagactgggtttgaacttgcaatcctcttgcctcagcctcccaaatagctgggaatacagggctgggagtactgttgggcaccaccatgcccagcaagggctggaactttcagctccatccagctcaccccacccccaaccctccagggagaggagaggggctaaaggttcatgcacccatcaccaatggccaatgatttaatcattcatacctatgtgatgaggccttcataaaaaccccaaatgatggggttttaagagtttccaggctggtgaacacgtggagttgctgggagggaggcagacctagataggagacagaagctccacaccccttctgcacaccttgcccgatccatctcttccatttggctgtttctgagttatatcccttataatgaactagtaattataagtaaagcattttcctaagttctctgaggcattttagcaaattatggaacctgacgaggagagtcggaggaatccccagtctgcagcctagtcagaagcgtgagtaacctggggacccaatacctatagaactggcatcagaaatgggggtagccttgtggtactgagcccttacacttgtggtattagatgattacgccaggtagttggtgtccgaattgaactgaactgtaggaacctagttggtgaccaaagaggtggagaattcgttggtgtgaggaaaaagcccatacatttggtatagtaagtattgtgggaaagaacagttcattggtatctaaactgtgtgttaaattcatagaaccagaaagcagaacagtggttaccagtggcaagcggcaggaggaagagaggagttgtttaattaatttcgcattcgaaagatgaaaaggtcctggggatcattttctaaacaatgtcaatatacttaacacacttaacacgagtgaactgtatacttagaattggttacgattattaatttcatgttatgttttgtaccactatttttttaatcaagaaccaattaaagaacagaagaaatatgtctataaaggtctcagtttttcatatttagttttcttcctcacaataaaaacttaccattggtgggataacagcagctcgatgctgaagctgtggcagatccagtggatttggttttaacggagatgagacgagtatagatccagtggggtttaacagtgaaggctttgagtccataggaaacattctgcaattgcaatttaaaaaaaagataaatgaatacatttttaagactcaaacatataatcactataagttcttctaagttagtatgtacatacacatgcacacatggacacatggacacacatatattaacccatataaaatatttggacagttaaggaaaaaggaacctacaaagctgattttccagataaagaaactgaatatcgtactcacttcagcagcgcacatactaaaattgaaatgatacaaagattaccatggcccctgtgcaagaaaaacatgcaaatttgcaaagcattttatattagaaagaaaagaaaaaagaaacctaatactgacttacaggttgaaatttatctgtattgtctatatctaaccaacaaaacaatctaaacgaagtccatttaaaactgttcagtcctaatttaccacaaatatcctaacatgggttaaaaactagttacctgttagaggatgttttattgggatcacagagtatttttttaaatatttgaataagctgctgtgatttttaaactgaaaatttcatccaaaattccagacctctggcttctcatgaaaaatggaaagaaccaacaacatgaaatcagcactccccaacagcagcgacctgccatgcatccagcagccgccaccccgctcacatgagcacacactcctctgctcaccatagtccctgccatctcacactccaccggctgatgttgcccatacctacactcaagtttaggatgcccaatatataaacttgaggaaattttgtactagtgtcatgctttatgggcctggtcatatttcccagtgttgtcatggtcactgggggaaggtgaacatttaaaaatgtagaaattggtaagaaaatcagaatgtatttaaaaaaacaattcacatactatataaagaaagattatattaaagctataggaaattgaaagtgttatttcggtcatttgggagcagtgtagactttagtgtgtcattaagaaaccatcatatttttccaaggaatttctgaatttcaaaactactatcatgttcatctcttaggatgtttaccatttaaaattactgccatcctacctaatttttccttcacgtatagttaccaaaaccaacagtgcaaaacacagataatccttatttagatgagatgtttcaataaggaatgcttaaaaagggactacacagcttgaatccatttatgtttactgcagttaaagactgacaccattaaaataaaatctagattactctgaggtgaaagaaaaagagtgatagtcaaattttctggtaaaccaacacttaagcagaacacctattttatttcaattcatgctgatgaaaattctagcatctactatataaaacactctgaggaatcagcactataatgctccatattattattctagtatcaaatctcattatggagtacataagatataaaatatattggatatgaactgaaaatacagtgacaccaagacacactctgaaagataaactttgaagagaatttagctatctgttgagtagcttgtctctttattcttattaaaaagaaaaaaaaggagtggggtttaattgggttcggattaagtgatgtttcagtctaattcacttctagaatttgcaccaatttatcattctactaaaattataagtgattcaatgtcttttaaggaaaaggaaacaccaggaaataaaatatattaaataaagtaataactgtacctgtaaaatatatatcttttactgtaatttttacaaaaaccataaagatatgatacattttttgtataattaattaacctttaatgactaaagctacctgtaaactgcagggagcggtggctcatgcctgtaattccagcactttgggaggctgagatgggtggatcacctgaggtcaggagtttgagaccagcctggccaacacggcaaaaccccatctctactaaaaatacaaaaattagccaagcatggtggcgtgtgcctgtagtcccagctactcagaaggctgaggcaggagaatcacgtgaactcaagaggtggaggatgcagtgacccgagatcgtgtcattgcactccagcctggggaagaacgagactccgtctcaaaaaaagaaaaaaaacttgtaaattaatctgcattatacctgatattttaaattacaaatatgaacaatctaaaatgttaactgatacaaaaaagtggtcataattatcattactttgcatttaaattatgctttctaaaaattttcagaacactgaacatgtctctcttttcagcattttcttctacctaataagtaggggctggtaggccttgttttgaggttgcactgccttagagaagcgggagtgcctcaatgcctctagcctccaccttcttctaccacatcccactgctgccctcctcaggcacaacagttatctgtggtttattcacaactttattagttgaaattccctgttatgctatcatacagaatacacgtaacaagacagatataggagaaatgtataatctgtttcattaaaatgatcatacaatagtttgtggttatttaaacagaacagtatcagcccaatattaaaattgtacagactacctataacgtgccaatatttacataggagacatgtctgcagccagcaccaccctgtgattcagtcaccaaccagcagagtaagcacggggaggacttatggaacgagcctcacctctgcctctctggctctccatccacatcctcatcagcgctgcacgtggcactggaatcattgtctgactggggctcgggcctttgggcatttatttgctgagctaccaccaaatcttcatctctaggttccaccttctcactggctctatccaagtctctttctttggtattatcaccttcaactttagatgcatggttttctggcaccctcacttcaacgtccacagagtcagctttggtagcgggtgggggatcacaaacagaaccctcttcagcactgtgctcctgctgatctacatccatctgctctgctgtctcagcactgatgctgtcattcacctgggtctccacactttcatcttcagctggttttgtacttggaactgctaaggagggagatgtactgggtgcagtttccgtggtgggctcaagctcaaccgcaggttctgtgtttcctcgagaagtagcattttcaggactgtcctcgctgggcttgacagcttcaactggtgaaggagaaggagcactttctgtatcagaactattttctgcaccttaaagataatgatacagcataaaaatctgataatgaacatgtttcaggtggtgatagaaaccatgtttgaaagtagttgtttaggatgaattctactcctttgatgacctcattgaagtatttacagccattgagaaggctaaagtttcctacagagtataaaagtgaaagatcaaattatcttgaccttctgaaactaaaagcataaaggattttaatgtctgaaaataatttatatgaaattgaaaaagaacgaacaataaaactaaacaaaaaacattcctataaatgatgacattctggtgtatttctagaagcctcttcctgtgaatttccttttacccagctgaactgacactctagaacggctccatccaatagacatataatgtaatcacatctgtaattttaatttttctgatggtcacattaaaaaagtaagaagaaattggtcaaataatttaaactttttttttaatttttaattttttggagatggggttttgctcttgttacccaggctggagtgcaatggtgcgatctcggctcactgcaacctccgcctcctgggttcaagcgattctcctgcctcagcctcccaagtagctggatttacaggtgtgtgccaccatgcctagctaattttgtagaatttatttaattaacccagtatatgtgaaatatcattttaacatgtgatcaatagcaaaaaatcataagattatttttcctttttttgggtactaaatcttcaaaatctggtgtgcattttacattttctgcatatctaattttttttttttggaggcagagtctcgctctgtcacccaggctggactgcagtggtgctttcttggctcactgcagcctccgcctcccaggttccagcgattcttgtgcctcagcctcctgagtagctgggattataggtgcctggcaccatgcccggctaatttttgtatttttagtagagatggggtttcaccatgttgcccaggctggtcttgaactcctgacgtcaggtgatccgcctgccttggcctcccaaagtgctgggattacagacataggccaccgcacccagcctgcatatctaaatttaaactagccaaatttcaagtgctcaatagccacaagtgtctagcggctaccacactggacagaaggctgtagaatactatttcacagatttttaatttaatgttgtaacagatctttccccatatcgtttatattgttctataatcgtttatattgttctataaatagactttcagtgctttttgacatctttacctagatatatcaaaggcagcacaaattcagtatgtcctgtactagagttgtaataaccactcgcaaatcagattcttttctagggtttactatccaattaaacaaaacagagaccaagaagtcatcttttaaaccctcttctcatttaccccatatccagccttgacaaggctcactgattttctctctaaaaatttctcttgaatctatccaatcctgttcaacttcacagctagcactctagtccaaaaccaactctcttcactccacttcagaccattctttacaacaaagatagagttgtctttttaaaagccagattttaccacaataactcactctctcactctcataacttttcagtggacccccattactattaggataaagtcccaaaattgctggtatgatctgcaaggccttgcccagtgggccccctccagcctctccagcttgcacacagctctctgaattcaagtcacactggcctttatttagtttgttcaatgcctcatgcatcttctaccacagagactttgtacatgccattcacctttactgaaaggctctttcacctacttttcctttggtgatcaactcaaacatcacatgcttaaaaagccttctatgggctgggcgcactggctcacgcctgtaatcccagcactttgggaggccgaggtggatggatcacctgaggtgaggagtttgagaccatcctgaccgacatagtgaaaccccgtctctactaaaaatacaaaattagccacatgtggcatgcctgtgctcccagctacttgggaggctgaagtaggagaatcgcttgaatccgggaagtggaggttgtggtgagccgagatcatgccagcctgggcaacaagagtgaaactctgtacccccacccccccaaaaaagccttccatggtttccttaacaaagttatattttgctaatatagttctgataccacatgtactagttacagttacaatcttacatttatttactagaatgatttctggctatttcttccactaggctataaactccatgaagacagagatcatttattttgattatcacttaagtactagcctggtacacagtagactcaaatactggctggattataaagtacatgaatggttgtgaaaacctaagtaaccgtctgggaaaaaaaaatattttttaattgtatataatagacagcaatataaaaaaaacttctacaaattcatcctttcaaatatgatgaagtgtcaactatgtatgtgcagggagctgtctgaggtaccacggacacagcaatttaagaaaacctaagcagatgctctcatggagcccatattctagcgtgaaatagacaacagtaaatatgtgatataggctgagagtggtggctcacgcctataatcccagcactttgggaagttaaggcaggaagaatgcctgaggccaggagttcaagaccagcttgggccacatagtaagacctcatctctacaaaaaaattaaaaaattagctagtcatggtggcgtacaccagtaatcccagctattgggaggctgaggcaagagaatcacttgagcccaagaggtcaaggcttgcagtgagctgtgttcacgctggtacacttcagcgctgggttaacagagtgagaccctgtctcaaaaaaacaaaagaagtgatatatcaggtggtgatcagtgcagtgactaaacgacaaaactgagaaagaagtgggtgaggaggtattatagaaaaaagtgatatctgaacagaggactcaaggaaatgagagaatgagccctaggcacatggtggggaagagcatcccaggtagagggattagaaagcacaaaggctcctgaagtcggggttggtttgcccaggaacagcaaagaggacagtgtggttggagcagagggggccaacaaaaaagcagctggcagaaagttcacagaggtacaaaggtcagttcatgcagagcctcataaattgcagtaaggccttgggtctttatttttactgagatgggaaagtattacagaatttggactagagaagaaacatgatttgattcacattttggaagaattacttgggctgctgtggaagaaaaaacagaatggaccttgtctctacacaaaataaaaaagtacattagtcaggtgtggtggtacacgcctatggtcccagatacttggggggatgaggtgggaaaatcgcttgagcctgggagtttgaggctgcagtgagccacgatcgagccactgcactccagcctaggtgacacagcgagacctcatctctaaaaataaataaaaagaatggaacaaaaagaagcaagagactaatcaaaaaactactgcaatgagggctcctcagaagcagggtaggagcaatggagacaaggatccaattctaaagagactaaagaaaacctaatttattgatatagtgaaagaccagagggaaaagcagcttgtggtggtagagacacatgagtttgctttggctgttaacaacaagatggctcttaggcatccaaatggaaatactgtaggtgatcaaatatatgagcctggagttcacatgagagttcaagtctccaaaaaacaaacaaacaaacaaacaaacaaacaaagacagacaagcaaataattcagaagagtacctcacatgtagtaaggttttaatatatggcagccatggccaggcgcggtggctcatgcctgtaatcccagcactttggaaggccaaggcaggcggaacacctgaggtcaggagttcgagacaagcctgaccaacgtagcgaaaccccatctctactaaaagtacaaaaattagctgggcgtggtggcaagtgcctataatcccagctactcgggaggctgaggcaggggaattgcttgaacccgggaagcagaggttacagtgagctgagattgcaacactgcactccagcctgggcaacaagcgcgagactccatctctaaaacaaacaaacaaaccaacaaacaaaaacggcagccattatcattactgaaagatcctaccaaagcattgaaaagctaacaaaaagcccaacttaaccttcatttctgtttatatagtggtagaaagccccaaatccaagggcaaactaacaaggcatttatcttcaaaatattagaagacatgttagtggttatacagcagatgatatcatttgacataagcacttttccaattttcttcttccaagccacaaaagagtaggaaggtttccaaggcataatgtttcaccaagcagtagccaaacatgagtatctttttttttcctaaaaatacaaaaaaaaaccttaaagaatgatgtagaaaaagagaacaagagcaaatccaaattttggtgaagtttggtctgatttaattcttctaatcatgaaagatactcaaacactcagatgtgttttaggaaaacagatagaggaaccctcccttcagcagctgccttcgttcttcaattggcaagagacttgccacacaataaacagtgcatctgtgctgtctcattgagattaggaataagtatgagatcacaggtcacatgagctgcatttatgttctcttcttgacactttccaaatgaagctaagtcaacaggaagagagagcctacaattctactgggaaaatcatttcctcttaataggaaactcttctagatgattgagcagatgtgatggtgccaccctacacttgatcagacatatatatatatatatatatatatatatatttttttttttttttttttttttttttttgagacagtctcgctctgtcgcccaggctggagtgcagtggcgtgatctcagctcactgcaagctccgcctcccaggttcacaccattctcctgcctcagcctcccgagtagctgggactacaggcgcccgccaccatgcccggctaacttttttttgtatttttagtagagacggggtttcaccgtgttagccaggatggtctcaatctcctgacatcgtgttccgccctcctgggcctccccaagtgttggggttacaggcatgagccactgcgcccggcccagatagacatattaataccagacttgggctttgttatggactgcattgtgcccctccccaccaaaattcttctgttggagccctaccccccaatgtaactgtatttgaagacgaggcctttaaggagatgactaaggttaaatgagattataacagtgggctctaatccagtaggagttgtcttcatatgaggaagagacaccaggagtgcgcacacccaaaggaaaggccatgtaaggacaaagtaacaaggcggttagccatctgcaagccacaaagacagccctcatcagaaagcaactgtgccagcaccttgaccttgcacgtacagcctccagaaccgtgagaaaattaatttcagttgctgcagccacccaatctgtggtattttgttatggcagcccaaggagatttattaacctccagccttcattaacatttataaccccagggaatactagccaccagaaacaaacccattaaaaccaagagactctgacaacctctctagaagtgccattaacacaccaaactaccttccctgtttgcagcactcttaccctaccctcgggtgggacttctctaatactctctctactcttgtaaagatgacctcatttttcacaaaccctcccaaaaacaagtttaaggttaggggttgttcaaagccaaaacccatttcaatacaagtttaagtttaaaagacaacaagaataatctataggaaaaaaaaaacatggaatctaatattactaaacctggaggatgtacaacttttaaagcttatacaaaataaagaccctacacagaaaagagatacaactctaattacacaaactttaaacaaaagtaattgaaaaggaaaacaaaaagaaaatgatggaaaaaattatctgcatatacaaaacatgaacatgtttaatttataatatatgaagagctactaaaagcattataaaaatccccacatcagaagcaatttccaaaaaaaaaaaaaaaaaatccacagaaactttaatcagagtgtaaactgaaataaattaggtatcttttttcttaccaaaaaaatcaagaaaacatttacctttccatgaacttgtcattagtttaaatgacaaagatacattatttcttaaatttccttaagtttcgtgttttttttttctatcggtgcttctaaggtcactaattctttttacgtaaaaacattactacagtacatataaatctctgtaaaaatatgaaaataaatcaaacttaagccaataaaataaagagaaatgtaaccaactatactaactgaacaaataaatgtggcaatgacacagacacacaggtattttattgatgttggcacttgatgtctgaagcaggactgccatttccaagatcttctggaccatcctaggtgctacataaatatttgttgattaaatgaataaaaacattatgttcaagtttgaagtctccacaccatgaaaacactggcacactgtttcctcaatgaagcaactcctacacagtcaaatgactaaaaattatttattctggatagcagatgtcacaactaaatttaaaattttgagataccttcgctgtcttctggattttcttcttcattggaggcttcaatatcttcatcctcctgagcagaaacagtggaagcgacactttcacattgagacacatctcgctcttcacgaggttttcgtgaagtctaaaggaggaaagagtattatttgatttaaataactaaaaagaaaaaaaaattcatttctgaaataatgtagaacattgataagcacacacacacaccagacaaggaggtcacatgtttgacaatagttctggttaaagtgcagataaatacctctccataatcactaactggccaaattttgtgtagatggctcgcctttatcaaactaagcaaaagttacatctgatccacttttggaattactcaccactatacatgtataaaaagccaaaaatcacatacctccatgctttttactcactccagataatgttatctaataaaaacaatatatatatattttttctaaagataatatataccttgaaatgtggaagacataacactacaaaaatcactgctcattattccaacagtaagagatcctaaatataccggtacatttcctttcaatctttcagaggcatatacatgaatataaatatttatgtatacatgtaaacacaaccaggaaagccctatgtaattacatattcacttttttaacataatgtagccatgagcagaacatatcactgttacaaattcttcctaattattgttattaatgatcccatgaaaacattatgttgacataatactgacatatattatgttgacatataattaaaattctcctattttaaggcattttggtaattttcaatttttggtataaataatgctgcaagaaacttccttcactagcattaagaatcacgcaattttataagcaacaactcatcattgatattactactgaatttctttttaccactcaatttatttttcttttttgagacagaatcttgctctgtcacccaggctggagtgcagtggcaggatctcagctcactggaacctccacctcctgggttcaagcaattctctgcctcagcctcccgaatagttggaattacaagcacccgccaccaggcccagctaattttcatgtttttagtagagacggggtttcaccatcttggccaggctggtcttgaactcctgacctcgtgatccacccgctttggcctcccaaagtgctgggattacaggcgtgagccaccgcacccagccaataccactcaatttcttttactataaaaaagcacaaattcagctaagcataggagctcatgtctataatcccagcactttgggagactgaggtgggaggatcacttgaactcaggagtttgagattagcctgcgcaacaaagttggacacctgtccctacaaaaaataaaaaaattagctctgtgtgctggtgctctcctgtagtcccagttacacagtagactgagccagggagatcgcttgagcccaaaaggctgaatctgcagtgagctgtgatcatgccactgcactccaggctgggtgacagtgagactcgttcaaaaaaaaaacaaaaaacaaaaaaacaaaaattttttttaattcctttttaaaaaaaattgtatgctcccttctgcaaagtatgtttatgcaaaattgctcattcttctactggggtcgcatatacgtaagagtacatgtgtacacatttaactataagacgttagctatttacattatatttataacttcatgttactaaatagaaggcttaatatcttctgtgtttgcagacccagggttctggaagtcccagccctgatggtcctctgtcttgtgccccttacagagcctacgtttcacctcatatgagctgtcagcctctcccagtgagactcctcagaagaggaaaatatactactgccctgttaaaaattacccgtacatctactcaacattctcatgcggatgatatttaggatccaactaaaatattaattaactcaagagaaacaatcattttctaatatcagagtcacagaattagttgcaattctcaaggctaatatttctaagttcatagcaggaatgcaagagaatcccagagacacactggctacactttctaaaaagctttcagaagattctgtaaattttcaaggataataactacttttaatttatttgtttgtttttgaatatgaggtgttgctgtgttgcccagactggtctggaacatctggcctcaagcaatccaggtgtgacctaccatgcccagcagataaattattatatggatttttccagagcccagtgtatgtccctctctcaccactatcaacccattctgtttggtcctttcactagtaactagggaagagacaactttttaccctactacaacatccctctgttcacatgcaataattcactacgttgccaagcattttcttcaatatatgatagtattcactaattcttaatgtaaagtcaaatatatagaaacacaggccaggcgcagtggctcatggccagacccagtggctcagacctgtaatcccagcacactgggaggccaaggcgggcagataacttgaggccaggagttcaagaccagcctggccaacatggtgaaaccccgtctctactaaaaatacaaacattagtcaggcatggtggtgtgtgcctgtaatcccagctacttgggacactgaggcaggagtatcgcttgagcccaggaggcagaggttgcagtgagccaagatcaagccactgcactccagccttggtgacagagcgaaactccatctcaaaaaataaaattaaataaaaattaaaattaaaaaaaaaaagaagacattctgccaggaaaactgcctttggggtccaactgcaactcttcccagaatctccaatcaaccagcctactccattagacactggactcaccaaccctccacaatcacaggagccagttccttaaatctcaatctttctttctatatatatgcatacacacatcctgttaactgtgtttctgaggaggaccatgactaatataacatacatttatttatttatttttatttttatttttcagacggagtcttgcactgtcacccaggctggagtgcagtggcgccatctcggctcactgcaagctccggctcccgggttcaggccattctcctgcctcagcctcccgagtagctgggactacaggtgcccgccaccatgcccggctaattttttgtacttttagtagagaaggggtttcaccatgttagccaggatggtctcaatctcctgacctaatgatccacccaccttgacgtcccaaagtgctgagattacaggcgtgagtccccacacccagccaacatttatattttaaatacatatctgactcattttttacttcactttttctcaaaacattttggatgttacctcctgaagtcaagtctttatcttgtcagtagactttttcatgttttggttgctacagcatatttttaactctcacattcttattattaacctaaaggccgctttgtatacacacttttaaatcagtcaatgttatactttgtatactcttaataaattcaaatcttattagctttactatcacactttaataattctcaaattttttggtctaaggatgcaacactcttaaaaagtattaaaggccgcagagaacttttcttttttttcttttgagacggagtctcactctgtcgcccggctggagtacagtggcgcgatctcagctcactgcaacctccgcctcccaggttcaagtgattctactggcctcccgagtagctgggattaaaggtgcacaccatcacacccagctaatttttgtatttttagtagagacagggtttcaccacgttggccaggatggtcttgatctcttgaactcgtgatctgcccgcctcggcctcccaacgtgctgggattaaaggcgtgagccactgcacctggccaaagagcttttctttatgggagaaatatagacagccagatagacacttactatatcagaaactaaaactaagaaaacttcaaaattttaaattattaaaaacaatataaactcataaattattatttatttatttattttgagatggaatctcgctctgtcgcctaggctggagtgcagtggtgcgatctcggctcactgcaagctctgcctcctgggttcacaccattctcctgcctcagcctccccaatggctgggactacaggcacccaccaccatggccggctaacatttttttctgtatttttagtagagacggggtttcaccatgttagccaggatggtctcgatctcctgaccttgtgttctgccctcctcagcctcccaaagtgctgggattacaggcataagccaccgcgcctggccaagaatttatttttttaatgaaaagtaaccattttccaaaaaaaaaaaaatgacttactaaaacagtggcacaaccttccccttttggaaatctcttccatgtctgatctaacagagacagcacaattctcaaggtgcttccacatatgatctaatctgtggattacattaagtaatctaatgttttggttgaagtataagaaaacaatgtagcctcacacagatatgtcgttggaaaagggaagaatattttaacagatttttcagatacttatgcatactattttttgatactgtaccaaaactcaccaagtgtcacttcttatttgttagttacaatatgaaatcttataccatatcaaggaacccttcatactctgttaaaatctataatctggccaggcgcggtggctcacgcctgtaatcccagtactttggaaggctgaggcaggcagatcacttgaggccaggagctgaagaccagcctgaccaacatggtgaaaccccatctctactaaaaatacaaaaattagctgggcatagcggcgtgcgcctgtaatcccagctgctaaggaggctgaggcaggagaattgcttgaacctgggaggcggaggttgcagtaagccaagatcatgccactgcactccagcctgggcaacagggtgagactccatctcaaaaaaaaagaaaaaagaaaaaaatctgtaacctatcttacgtttggtatattaaaaaaacattatcaatcttttatcaatgcatgatccattatgtattagttcattttcacgctgctgataaagacatacttgagactgggaagtaaaagaggtttaatggacttacagttccacatggctggggaggcttcacaatcatggcaaaagggaaggaggagcaagtaacgtcttacatgatggcggcaggcaaaaaaaaaaaaaaaaaaaaaaaaaacttgtgcaggggaactcctctttctaaaaccagtagatctcctaagacttattcactatcacaaaaatagcatgagaaagacctgccccatgattcaattatctcccactgggtccctcccacaacacatgggaactgtgggacctacaattcaagatgagatttgggtggggacacagccataccatatcattctgccgctggcccctcccacatctcatgtcttcacatttcaaaaccaatcatgccttcccaacagtcctccaaagtcttcactaatttcagcattaacccaaaagtccatagcccaaagtctcatctgagacaaggcaagtcccttcccctatgagcctgtgaaagcagaagcaagttagttacttcctagatacaatgggggcacaggtattgggtaaatacagctgttccaagtgggagaaactggccaaacgaaaggggctatagggtctatccaagtccaaaatccagcagggcagtcaaaccttaaagctccaaaatgatctcctttgactccatgtctcacgtccaggtcgtgctgatgcaagaggtgggttcccacggtcttgggcagctccaatcctgtggctttgcagggaacagcctccttcctggctgttttcacagggtagcgttgagtgtctgcggcttttccaggcacacagtgcaaactgtaggtggatctaccattctggaggatggtggccctcttcttacagctccattaggcagtgcactagtagggagtctgaccccccatttcccttctgcactgccctagcagaggtcctccatgagagccccacccctgtagcaaacttctgcttgaacatccaggcgtttccatacatcctctgaaatctaggcagaggttcccaaacctcaattcttgacttctatgtacccacaggctcaacaccatatggaagctgcaaaggcttggggcttgcaccctctgaagccacggcccaagctgtaccttggcccctttcagccatggccagagctgctggggtgcagagcaccaagtccctgggctgcaaacagcaagggggtcctgggtccagggcatgaaatcattttttcctcctcagcctccaggcctatgatggaaagggctgccataaagacctctgacatgctgtgaagaaattttccccattgtcttggaacttaatattcagctcctcattacttatgcaaattcctgcagcaggcttgaattcctcttcagaaaatgggattttcttttctatcacgttgttaggctgcaaattttccaaacttttatgctctgcttccctcataaaactgaatgcctttaacagcacccaagtcacctctagaatgctttgctgcttagaaatgtcttccgccagataacctaaattatctctctcaagttcaaagttctgcaaatctctagggcaggggcaaaatgctgccagtctctttgctaaaacataagaagactcacctttgctccaattcccaacaagttcctcatttccatctgagatcacctcagcctggaccttattgttcatatcactatcagcagttttgtcaaagccattcaacaagtctctaggaagctccaaacatttccacattttcctgtcttcttctgagccctccaaactgttgcaacctctgcctgttacccagttccaaagtcgcctccatattttcaggtatcttttcaccaacaccctactctaccagtaccaatttattgtattagtccgttttcacgctgcttataaagacatacccaagactgggaagaaaaagaggcttaaagggcttacagttccacatgactggggaggcctcacaatcatggcagaaagcaaggaggagcaagtaacatcttgcatggatggggcaggcaaaaaaagagagcttgtgcggggaaattcctctttataaaaccatcagatcttgtgagacttattcactatcacgagaatagcatgagaaaaaggcctgccccatgattcaattatctcccactgagtccctcccatgacacatggtaattgtaggagttacaattaaagatgagacttgggtggcaacaaagccaaaccatatcacattataacatcatgaaatggccatttggaaagtagagttaaagcaagtttttcaaatttggatacatttcatcacacagtaacaactatcgcatttgctattattaccactgatctcatcagaaaatctgtaatgagaaggtgtgaagctcatggttagagaaacatattttccaaaattctcattttttgcttgaaaactcaaaattttaaagtggcaacaaacactatcagttattttatttcaaagacagcctcattcactaattttcaagaaaatgtctcccaaaatcccagtctgaaaacatagtttgtctgtcattctttcaatctaaaatgacattccatgaaaaaggggaggctggtgcaacttagaactcgaacaattgccaaagtgcttttccctgagagaaccatcatattttggtatagagcagaactttatgtttacttcccattacatgacacgaagtataaaaagacatactcaatgggtgagatttaataaaattaacttttactgcgtcatcaaggacattcttaagtgacattttaagaaaaaactgcaaatgctcagcgatgaaaaatacattgagtactagcaccgtttggttccctgccaagatttatgcttaggcatcagcaattttatctaccacagctttgacaccataaatgcaaatgtcatatactgaaaaaaagtaaataacatttgattgatatttttatgaaaacagtcttgacctcatggaatcatcaaaaagctctatggtctttgacaaccactacactggaacttacttattaaggaatttccaataatgttatactctctggtttttaatatttataccatggaatcttctctctgaaaaaatgtctaatataccaaatcaattcactcgatattatcaacagacctccaactaaagttttcaattcaatctccaaaaagtttgtatttttcaaatccagcctacagtaattcaagagtatttaattccctttactacaaatagaaacttcggaggaggaaagataagctggggcaggtcatgatgggccttgtttggactgttaggaatacaaatagaaactttactccttgagcaataaatagagaaacagctagcctatactaaaaatttagcataccttttacatataagtgcaataaataaaaatataagatacaaaaaggtttctcttaaaaccaatctctggagctcagaaaaaaaaaaaaaaaaaaaacatcaaggctagatgcagtggctcacacctgtaatcccagcactttgggaggctgagacaggtggatcacctgaggtctggagttcgagaccagcctggccaacatggtgaaacactgtctctactaaaactacaaaaattagccaggcatggtggcgggcgcctgtagtcccagctactcgggaggctgaggcaggaaattgcttgaatccgggaggaagagtttgcagtgagccaagattgcactgctgcactctagcctgggtgatagagtgagactccatctcaaacaacaacaacaacactctaagtaaaaaacagtaagtaaagagtcaccaccccaatatactcactttctgtttatgctgctgtaagaggttgtcaagattgtgtcgccttttatagttaaaatagaagtttttacattgagcttcacttttcgttcccaccattttagcaattgctgcccagttacgaccatgttctactagacctgcattttaaaaacagaccaaatgttaattgaacagtcacctgatcaagcaaacaagagaaataataaattaacttaatcactgtattcacaaccattgacactagaagtgtgctttcaattacttatcatatatactttgatacttataaaaatacttattgaaacaaaactcatttacagttctatatttttccccctcaaatttaaaacatgctcattaacagaagggctaaaccttgtccttcctatgtatctctcacagggctaggacaacattagacacattagtaatagctcaaatacttgcaaactaaatgattaggtacatctagatctctggacacaatatatcaagccaataagataatcatatataaatgataaacacaatttaaagacatatatatgactccacttataatccatatttgtcctcagtcaattcacaatcaagcaatgccatcagaaaaatactagccaatttaaaaaaatcctatggtaatacaatgcattacagaaacctatgcaatttaacacttctctaatcaatatatatatgcacacacataaacacacacatacgtgcaaagaatatgtatctatgcatttgtatacatatataaggggtgatacaaaaaaatatgaaatgtgtcactcaaatgtcaagctatttacaataatttatctttacaactgcaaggtaaatatttaaccaccaaaaattagctaatctttctcaatattaccaattatttatcctattagaaattttagttcaatttcaaattatagtacattaacaagcaacgacagaaaagcacaaagtccataaagtgccagagtaagaggaaggccacaaagctatgaaagtggcagagacaggactcaaaccttcgctggcctggttacaaacttcatgctctttcctctgaatcacagagcaatctgctagtggtttataattacatgacttaccaaatgcaaactgacaaaagtatttaccatcctatcctattaaatacaacttttaggtaatagaaatatagactttatatcaacattcattccagaacaatttcaatagcatagagtcataattattctaaaaaagtgaaaacgacctacttgttctttaattaaatgacattcaaaataaaactgcagagagaatcttaaatcccttaaaactgggcatcttaaacaaggcacactgggggtactttattgggtaccatactaccagaaaagaactcttaaagtcacttctgagtcctctttgcctttttgaaagaattttttttccaattaaaacaattagttccatctcactcattactaataaccctaaaaaacaaaacaaaaacctgagaaaccagaactactacaatttaccttttttagcaacttccatttcttcttctgtccatcgagaggtctccacaggctctgtagaaactaaaataaagagagaacccaatcaggcagagaaaaacaaagttaaatcctttattcaaaccaatcatataattatatctctttatctgacataaaagactatgtaaaagcatttggtgaaagaaactgcagaaataggatagtaacctctcctccaccaaactagaagaaacaagtcaacacttcaatattatgatctttttcagtgttgttaaaagttctcttcatgtctacatttttaaacattttgtttttttctggagaagtcctacctcacccagtagcttcccacttagtgatctccacctctcctctcctgcagtgtcaaaggaagaagcaaccctcctccttcctgtccaagcacaattccctctcctctcctctgagcctccatcttgtcctaaaactcctggagcccctttagttcatccccgagtgtctgacatccagtgggtaaagatggatcatgaactgaatatgttctcttttgcttcaggaaaaaaacaaaacaaaacaaaacaaaacctgagaacatcaggcctgatatgagctcctgccatattccctttctcaatttatagtaccagcattcacccagtcactcaagttaccaataggctccttagactgatagactaatttttgaatcttgcctcccatttaccactcacatccaatgacatgcatcaactctgaatccatcccctccttgcttgggccactgcatacatgctgggccctctgcctccagcctttattctgtctaaactgacctccacaattgctatcagttaacttccaaagacacaaatctaatcacagcattcctctatttaaaaacctctgcaagttccccacttcataatcaaagcaaaatacatttcaaacaaggcccatcatgacctgccccaacctatctttcctcctcctatctagttagtgcccctatctcattcttgccattccctaaactgcattttctttcatacttcagtaacaatgatacctctgaatcattaacagtggtactctatcattaatctagcctttttataaactaatgagacaatacttaatgagagagagaaagatgctttgactattagatccagtattcccttgcctaagaatttattccatgacaaataatttaacataaaatactatgtgaataaagatttttttattacagtgctatatacattggtttaaaagcagggaagagggcagacaacctaatcattcagcaataagagaatggttaaagaagtcatgcctcaatattacacagccattaaaaaataaaaatggtaattattagaaattagaaaatatttatggcacactagcataacaactaaataaaaaacagctatattggggtggcaagactgggtgatgttctttttcaaaaaactttgacattaaagtttaaaaaatttaaagaccacacttcaggattatttctaggttgtcaatattaaaagtcctttctaccctatcctagcagtgaaacagaatcccgaacaaaattatggcctgtttatgccaattgtttccactcactgggttctggtggcggtggcagaggtggtgggggctcttcagtagccgctgcggctgcagcactggcagctgcagcttcgtttgtcatggacctggtgatccggcccttacggcggccctgactgttggcagtctttcgcccccggggtgtggcttgctctctttcctcagtttcttctgctgtaccatctatcttgtccttttccttggtattttctctggacacaaaagcaaatgaaaacttgtgtgattccaaagtatacatacatcgaagaaggttttagttttgaatattatctaaatagaaattgaataaaactacctaatctctcactcaaaaaaaaaaaattatcaacaattctgccataccatagtttttaaaagttttgaccagctaaaattaagatattttataagacctattttacatactaatggacttaaaatttaaacacatttcaaaccaactgatttagaaaccagaactactccatgagaaagtaacaaatgacagcagaaaagccctagacctgcaatccagagacaacagcctacaccaaaaggcaggaattctggggttttatttgcctttagtctaggttgcctcatgtatgaaatgaagaagctaaaatagatgatcttcatgatagatgccttttctatagtaataatccacaatattgttttacagtaataatctacaatattgttttataaaatcagactcaatactctaaatcatgtctgatactaattatgtacaaattgggcagtaatggttaatacttaggaaacggcctctggagccaggctgcctgggtttgtaccacagttgtgatttactagccatgtgatgaccctggacaagctgcctcacccccatgggcctcagtttcctcatctgtacaatgagaaaaagtttatttcatgggactgttgccaggactgaaggagttaaataaagtacccagaacagtgcctggaacacagtcagcatcaagtaacagtttgctattattcaagctaaaactccctcaggatataaagtgcttaccatcgtctcaggcatgtagaaacatggtggttcctattaatagcaacagtactacatgtaatactggaagaccattttctgtactacttacctcccatggttgttatatttaaggaaacgtactcaatgtacatttttgcaaatgaatggatagatggcaatactcaaagactcaattattcttgcttaatggaagatgctgatttttttcaaaaataattctctccccttcagtcctaaattgaagtacaacatagtcctttccctttacttacttattcccttataaagctggcttctattctgaagcctcctgttaaaagatgttttctcaaaagtcaccaatgacttgcaaactgcaaaatcaaatgacctcttctcaattttccccgcaagtctttctgttacaactgacgctgcagttaattcttctttttatatcacttgaaactcagcttttgaaatatccctgctgctactctggctttccttcaagggacagacctttctcctctcatcctttcttttgggtttctgttttttgtctttgagaaagtgtctcactccgtcacccaggctgaagagcagtggcgcgaacacagctcactgcagcctcaatctcttgggctcaagtgagcctcccacctcagcttctcgagtagctgggactacagacacgtgccagcatacctggttaatttttgtattttttgcagagacagggtgtcaccatgttgcccagggtagtcatgaattcctgtgctaaagcaattctcccaccttggctgggattacaggaatgagccactgtgctgggttcctctcatccctttcatacggggatttcccaaggctctcccctagagccttagagctatgtaaggttacccattctcataagttctaccgggaggactccaatctctatctttggactcacaccccaactccaaagactcaggcttatcttcccaactacctgctggaacggccacctggattttccatcaatagaaactgaacatatccaaaatcatattcatcctcacctctgctccttgctccacgtcactctctaatcatttgttgttaacattcctaccatgttcatcatcattcaggtttacagatttgatatcatcctttgctgtctccctcttcccatacttcctacatgtgatctaatgccaagttttggttatttcatctcagaaatgcctctctcactaattttaccatctctatttctactaccactacacttactcaacaccttagtaccccaatcctggcctttcatactggcctccctgattcatatctctagtctattcattttatcttgccaatgaatcaacattctagcaggatagctttggcaataaaccactccatccattctaatccctttctaactattcccagacagacacacagcacagcctcctgaatgaagtctaccatttttggctttcattaaagctctacataatttaattccaatccaccttccacttctcttcttgatgcacactatgttaagtctaatgaaatcattatcttccactagctattcatgtgattccctctaccctacccacattaaccactagcatctgctaatgtcctccaaattatccacagagaagtagcctcgacctcttcttaatctgccaaagcacttaactggtcgtctgttgacttcttactgccaggcttttatttcttaaagtaatacttgtactttacctacttttcccctactaaatcatgaactacctgggaatagtatacatcttacgtattttcacattctccctaagacctagctcacatagataataaataaaagcttgttaaatagtttagaaattttaacaaaaaaataaaatcaagttatgacagagttccatgtgagaagaaccactggctacatggcccaaaaaatgtttaacccaaactaaaagaaaaaaatatattcccttagaggtatcttcctcaggtataaaattacaatgagaagaatatctgtctcttttaaaacatggcaagtgactagctactttagcttccacaaaactaggtaaatcttaaacagttccacaaggactatagatataacataataaatattaaaaaggaacaaactactgatacattcaacaacctaagtgaatctcaaaggcattcatgctaagtaaaagaagccatacatactgtatgatttcaatttttatgtaattctagagaaagcaaaaaagatacatgacggccagaggctggaaatgaggaaagagaaactgactgcaaaggagcatatgggaaccgtttggggtgatggaaacattctacatcacaattgtgataatagttacacaagtgcatatgcttgtcaaaacacatcaatgtacacatttcaaactggtgaattttgttccatgtaatttacaaagctagttcttggggaaaaaaacaaccaaaccaactgtcatgcccccactcctaccacacccctgtatgtccacaaaagcatcaacaataactccctgagtggcagaatcataggttaattttcactatatttttcttttcctgtttttctataatgtaattttataactaagaaaacagcagtaacaacaaacaaacccaaaactccattttatatgacgaagtcaataaagctggaatctaaaatataaaaatgaactcttcctgtcttagcatttttatactaatatatactacctgaggctcaaaaacagaacctgaggaatcttccaaatcaaaaattaaattacattcaatatatcctggaggaaagtatatattactataacccatcccttctgaaaagtaataataactcatgacttgcaaataagttcattaagtcaaaaattacatttactgtaatattctattccttaatcacatcaacttaatcatgtaactattagatgtttctaaaatttcggccaggcgtggtggctcacgcctgtaatcccaacactttgggaggctgaggcagctggaccacctgaggtcaggagttcaagatcagcctgggcaacatggtgaaaccccatctctactaaaaacacaaaattagccgggcgtggtgacgcgtgcctgtaatcctacctacttgggaggccgaggcacaagaatcacttgaacttgggaggcagaggttgcagtgagccaagattgcgccactgcactccagcctgggcaacagactgaggctctgtctcgaaaataaataaataaaataaaatttcagcagattaaatttcattatttaaaaattactaggctgggcgcagtggctcacgtctataatcccagcactttgggaggccaaggcagatggatcacgaggtcaggagatggagaccatcctggctaacagtgaaaccccatctctactaaaaatacaaaaaattagctgggcatggtggcagatgcctgtaggcccagctactcgggaggctgaggcaggagaatggcgtgaacctgggaagtggagcttgcagtgagccgagatcatgccactgcactccagcctgggcaacagagcgagacgccatcacaaaaaaaaaaaaaaaaaaaaactatacttttgcagcaacatggatcaaactaacggctatcatcttaagtgaaataactcagaaacagaaggtcaactatcacatgttctcacttataagtgggagctaaataatgtggacacatggatatagagagtggaataagagacactagagattcaaacaggtgagagggtgcgagggggtgggtgaggtataatgggtataatgtacactatttgggcgatggtacactaaaagcacagacttcactactatgcaatatatccatgtgacaactgtactccctatatctacaaaaataaaaataaaataaaaataaacatttaacttattatataactaattatttaactcacttggagtcttctttttcatctttttcctcttcatctttcttttcttcttcttttttttctgttttttctgctttatcctcttctttttcttctactttttcttcttgcgagggtcgagcaatttgctgctagaatgaaccatcatttgtaaaattcaaaggcaaacagaaatagctccttatagtgtgataaattatgtctatctaaaaaaattttaaatgattgttagtcatttacaatgtaactggtgatcgtgtgttaaaaaccagtctagaggtttttaatgtattctatatgtactgcttgaagggtcctacacgcagacacaaatgctcatagcatttggacccacgagaaagtgaaaatgttaagattctactcggaaatctggggttggttcccttttttggcaacctccacatttaatctgtcactcaagcattccaattctaccttaaaatttgataacccatacataatttatcatgttttagatacttaatatgtttccaattttttcatcactatctataatgctataagaaacatcttcatgcatttatacttttgagcgaaagtctacttaatggaatatgtaaacagctatggtcgttactaagactgaagtaatttggaaaaatactaaagctataataaggtgaaaagaagtaaaatgcttaaatatttctaagctaagcagtcacactaggaatccttttatctctgatgtctcatttgcaaaacctgtgactctaaaagaaaaaagtgaaactaagtgtgcaatgaatgctactacagtagcccccaccatatcaggagtttctctttctgtggtttcagttacctggagtcaactgcagtatgaaaatgggtaagtgtagtagcgtacagtatgatatttgaaaaaagaccacactcatgtaacttctattacagtatattgctataactctattttattatttgttactgttaattccttactgtgcctaatatacaaatcaaagtttatcataggtgtgtgtgtgtatatgtatatatctgtatgtatatatacatgtatgtatatatctgtatgtatatatacatgtatgtatatatctgtatgtatatatacatgtatgtatatatctgtatgtatatatacatgtatgcatatatgtatgtatatatgtgtgtgtatatatgtatgtatatatacgtgtatatatgtatgtatgtatatatacatgtatgtatatatgtatgtatatatacatgtatgtatatatgtatgtatatatacatgtatgtatatatgtatgtatatatacatgtgtatatgtgtatgtatatatacatgtgtatatgtgtatgtatatatgtgtatatgtatatatacgtgtatgtgtatatatacacgtgtgtatatgtgcatgtatatacatatgtgtatatacacacgtgtatatatctgcatgtatatatacacatgtgtatatatgtatgtatatatacatatgtgtatatatgtatgtatacatacatatgtgtatgtgtatatatacatatatgtatatatgtgtatgtgtatatatacatatatgtatatatgtgtatgtgtatatatacatatatgtatatatgtgtgtgtatatatacatatatgtgtatatatgtgtggagatatatatatatatctctcatagtatattagggttcggtactatctgtggtttcaagcatccactgggagtgttggaacatatcccctgtgaataagggggaactgctttattttgcttttaagagacaacatctcactctgtcacccaggctacagtacagtggcatgatcatagcttactgcagcctcaaactcccaggctcatgcaatcctcccacctcagtctctcaggtagctggggctacaggtctcaaactcctgacctcaagtgattctcccacctcagtctcccgaatgctgggattacatgcacgagccattgtgactggcctgcatttttatttaattcagaaatcaaaactgtataaccaaattaaaacagaactccaacacatctttccagcacagcaggctggcccttgcacacctccctccaatcaccatcctgccacatcatcttcgctgttctggactcacctaaacatgcccagcacttgcatagctttctacccttccctttcctgataaagtcccacatagtctctacaattcaggtcaaaatgctacatctcctgtgaagcctctcttgatttccacagaggaactctggggccatgtccttccctctccaccacagaccacacctgcttgtagcactgtcactaggtggcttagtgcctgcttatcagcatccatctggctctctgtgttatcatctcatcaagaacaagaatccaatcttacttctctaagcatccccagctcccaggagagtgtctggaccatgatgataggtgtatgcatatgttggataaaacaaaaatcaaattcctttattccagttatctgaaaagtttttaccctccaatctcgactgttcattctgatccaggctaatgtcaatcttgcctcatagcaactctacctgtcctcttacttgtttttaccagacaatatggaagtaactaattaattttaagaaaaatttcccttcttaatagcgctccaaagtcttttacctattcatcaaaaccaacacttagctttttccttaagataatgaaggccttattcacctccccaaaagaagtcccatccacattatgcctccttctaatccaaggggcaaggaaagaagaaaatgaatccttcttggtccacttccagaacattgctgaactgtgatattttaaaaataattcctttttcacgtttcataaaatctccctagatcaacattctcttttggtgttatggaatgacttcttaaatattccctagaacatataagtgattgcatcacatggctcattatgccttgacattatttttcagatttcaaaatgcatgtcaatggcttttctaacactcgccactcaatcaacataacatctcacagttaaaatacttttaggtcatggccattaaactccccacatgcaaaatcacaattgcctcctcattagcagtgggcactgctttgcctcctagatcctaaaatcagaaagtcttctctccaactacaaccacccatcgcacaccttcattgtgtctgatcctgctttgtcctcattgtgacctttgaacccttattctatcaaattttcacagtccagtgagaactgtacctactattctacttgctaaagcatttcaataccatgattccttcacttgctttatctgaccttcctaacttctcaccctggctaactgccagttcctctttcttctggatatttattgctagagaaaactgataaactagggagattttaaaatttaaactttcaaaccatgagtaggtctgctttataattgggcaagttttactcagctctgactccctgggacactacagtggtcacaagacctgtttaaatgctaataacctaaccctgtaaccaatgtagcatccatgtgtcactctgaaccagtaagatggcatagtaaggacaaatcatgccctttgcctagcaagtgagctgtgtaacccagaaaacggtttatggcctaaagatacgacggggacatgtcaactcagcagaacgtaaggaaagaaattcagtatccccttagagttgggtaacacatgctaatcttatttccccaatacttttctgcttctaatgccaatcagagcttcaaagtaatcccacgcattccctgctgtctaaaatccaaccaacagataacttcactcccctttccctggtgctagggaataagaaacaactgcagcacctgcttaaaccaatcagtgtaaagaaggaaacagctcctggctctgcatagtgtggaaatgatccaaagaaatggacagagttgctgcattagagtctagagaagtgtttggtacctgtccagcagaacctctcacccctctgtatactgaccaggcagtggtgagcggagaggaagtgcagtcagcagcaactggaggacctcacctttgtgcaatatgcataaagacctatcataacaactgccactgacattcaagagagtaaggaattacctctaatttaaacaagagatgcttggaactacttttgtttcaggcaaatctgtaaagagaagtgccagtcaatccacatggtctaggatgaaggttacaagttacatccctcaactccacagggtggctggagcaaaagaggtccaccccttcaaaagaaacccttctaaaagttccctacacagacacaaatattcgcaatggctcgttgtccaggtttttccttttctccccttctttaaactcaatacttgagagccaataaaacaagtttaattctgtcagggagttaatataacatgaaacatttctgtcaaataacaagctattcactatgaatgaatattctagaacacatataaaacaaaatgaaaattcaaagaaaaaagtaaaagttaagtgtatttctttttatttttatttttattttcattgtgagacagggtcttactatgtcacccaggctggagtacagcggcgcaatcttggctcactgcaacctatgcctcccaggctcaagcgatcctcccacctcagcctcctgagtagcttggactaccagcacacatcaccacacctggctaattttttttttgtattttttgtagagatgaggtttcaccatgttgcccaggctggtctcaaattcctaggctcaagtgatttgcccacctcagcctcccaaagtgctgggactttaggcataagccaccgcacctggaattttttttttttttttttaagactggatctccttctgtcgcccaggctggagtgcagtggcgtgatcacggatcactacagcctcaactcccaggctcaagcgatgctcccacctcagcctcctgaatagctgggattacactacagtgcacgccactgtgccaggctaattttttaatttttttgtagaaaatcaaatttttcagttttttaactttttgtataaatttttaaagtttttgtccaggctggtctcaaacctcccaggctcaagcaatcctcctccctcagcctcccaaagtgctgggattactagtgtaagccacaatgcttgacctggtaagtgtatttcaacataatttaagaacaggattcagtttcatatgggtcccctttggcaagatcaaataatagtttatgctaagattcattactactatatataaatgaatatctaactatatatatgtgctaattatatttgttttaaatgttcaccttttttagaaaagagaaacagacaagttcccactcaacagaaaataagttgccaaaaaacgaaattactaaatttaataacaagcagcaattgtaaataaaaatttacacgaggaagaaaatgaaataccgtttcactactggacaatattttctttaaaaatatacttcgggaaataaacagacaatatcttaagcctatcttatcaaaatttattaacaattagtgctcctaagccaactgaatttcagactaacttcctgaagagtgaaagctgtcaatcaccaaaaaacacactgtggcaatggcaataaagataacagtggctaccatttattgggcactctctgtgcctgactctgcactccagggactttacacacatacccagttcttattaaccatgcaacctaagtatcactgaccccactctcatgaatgtggaaaccaaggctcaccaagtgaaaggacccacctagagtcacataggtacaattgggcagagcactctggggctagagttcttgctgatataataaacttcttaacttgtctaaaataatctttctatctagtgactagctaacagtttagtcagaaaattcctccaatttcaaaattgctatatttacctaagtatatgcttctgaatacctttagggaataaaaacacactggcataaaggggaaaatggtgttagcataaaagaagggcatgaattcctgtggaaagtaatcaagcatttggaaatgaagaatatggtttctaacatgacttgctttactgcaggtaactagcaagtaccacagtaattctacctgcacagtgacagacttaccagatggcagtttatgttggaaaaatgcagcatttactaggggaagaaactcttactgctagcaagaacaatgtacatagaatcaaactattacgtagggcataatcctagatcctaaataataacattcaacagtggtttttggcttccaatctccaatatgtattcattacttcaacaaaaacatatagagaaccacactcactctccatggaatggtaacaagctgaactataaaaatgggttggggtagtctctatcagaatttggagagaagagttaaaattcctgccaagaataacctctgaacacaattttaacaaaaatataaacatctgtctcattttcctatgagtctaagattaaaactcattttcagagtaaacactactaagcttccctatagcaacaggttttaaaaaatcaaactttgcaaacttagaatctatcaatagcaaactacacttttttttttttttttttcctgagatggagtcttgctctgggattctaggcatgagccaccacgtccagtctggcttttcttgctttccttccttcctttccctccttccttccctccctcccttccttcttcttcttcttttttccctccctcccttccttccttttctctttctctcttctttcttttttttccagacggggtcttgctctgtcacccaggtgggagtgcagtggcatgatctaggctcgctgcaacctctgcttcccaggttcaagcgatttttctacctcagcctccagaatagctgagattataggtgtgcaccaccactccaggctaatttttgcattttcaatagagacagggtttcagcatgttgcccaggctggtctcgaattcctgacctcaagtgatccacccgccctggactcccaaagtgttgagatcacaagcgtgagccatcgcacccagccacacactatacatttatctgctgaataaaaattacttcctacaaaaaggaggctgggagtagaggatagggagagtaatcaaactcatattgacaggatcaagcataaacttcagcagaactttaaagaatctttaagtaaacatgccataatggctgtgagatcacctgagctaaaccctcctgactagagcttggttacatagcagagaagtaaagtgattttcaaattagttggatctctgtatccaccagggtaaaatcaagggagttgatacatagattttgaaaatcttaaccttgcaattcaattctgtttttaaaaagaagtattctaaccttttttctatatagcaaattctatatctttaacccagatctttttcctacactccagacttatatgtctaactatccactttacttggacctcatttggatctctgcttagacacctaataggtatttcatattcagccatgtcctgattttcccctcaaaacctgctcctccttcagtcatgcctgtcacagcaaatggcaactccacaggtcaaaacttgttttccttgattattgtcctttcctcatccccacaatcaatccatcagcaaaatctcgtggttttaccttcaaaagtacatccagaaactaatccgttctccccgcctcctcactgtagcctagtccaagtcaatgggattattaaaacaacctcctaactggtttctctgcttcttctcttgtctccttacaaactattctcaacagagcaaccagagtaatcatgtcacaactgaaatctggcagccctcttttgctcaaaaccccagtggcttcttctctcacctggtatcagctcaaaaggccttcagttttacacagagagcccttaaactaacaccacctaatttctgaaaagctgcccctctattttgacacaaataaatggaataagtatacaaacaattaagaaacaatggtaaatctggtggcatgagatgatggtctaaattcatttaactcacacctctcccaaattccccgtgaaacaaccagagaaatgtaaaattggaggaaaaatcttcaaagcaataacttaaaagctaatgagggcagagctagcctaccagaagtgctgaccaacccaaaactgagcctacctgggggtaagcaacctaaggctcaggtcaaggtgagggtatacatggcaattctcacatctgcaaatacattctgagacaggtactttgaaacatgcaacaagaatgtacagaagagaacaccaacatggctggatcttaacaaggatcggtgtgccacagagaggagtgaaactgtgtcccagacaactttaggaaagaaacgactgtttcagaataacaaacatccgtgccccatagaacttcctgctagagctctctcctctatcatcatgggcaactggctgctaatctggcaaaggttaaggtacactgtataagtatcaccttatctcttacgttaatgtaggactgaacattttaaacagtaacatatataatttctaaagataaagttataaatactatttggcaattaggaacaaaactgttagaaatttgcagctgaggccgggcgccgtggctcatgcctgtaatcccagcactttgggaggccgaggcgggcagatcacgaggtcaggagatcgagaccatcctgactaacacggtgaaaccccgtctctactaaatatacaaaaaatgaaccagatgtggtggcgggtgccggtagtcccagctactcaggaggctggggcagcagaatggcatgaacccgggaggtggagcttgcagtgagccaagatcgcaccactgcactccagcctgggcgacagagcgagactccatctcaaaaaaaaaaaaaaaaaaaaaaaactgtagctgaaacttgtttaaaacatagatggtccctatgatctctagctaaaagggtattacaggaccttgattccacattctttaggggaagcaggaagaaaagccctggcaatattcttctctctggtggaatagtgcttcctatttcactgtcaacactcaatttattccttttctgtcagtacatctttatgaagcttggcaagcacccatcctttgtcttacggtactgcacccatcagtgtacaagtatgccctttatcctcccttctctgatcctcattagccctaccgacccatttcactattccactttataaaaaaattttaaaaacaaggttgcacttgtactaatgccacttcctcaccttctgtatcttcttcaactctgtgtaaccgtgtttctgccccctcactaattcactgaaaatccacgtctaaggcaccttggcttactcaacctctaacagcattttacacagttgactcatgaaacactcgctatacttttttaaacaagaaatactgtttccaaagagcatgtaatcacatcatgtggggtggtggtgttctgtgggaaataatgacccagaaaacataaaaaggttatagctgtgaatactgagagaactgggtcaataacctatatctggtaaccaggggctatcaaacgaagaaagggagtaagaccccaccccaacaaaagggtggctgagtgggaaaaccagaagagatttaataatgctaatgaatcgttgcagtgtcggagctcatgcatgcaagtccttattgtaatatctatccgggtgtagacagcaaaagcctccatattaactgtggtggtggcagtagcgcagcagtctctctggtaagcacctgtgagctatggcagctgctgatcagttatttggggaaaatcattttgaaattactgaattgcaactgtgaaaactaacctttttcagttttatacttctggaaaactacctttagtaaaagtgccttttttattttttggagacagaggtcttgctctgtcactcaggctggagtgcaatggcacaatcatggctcactgcagcctcgactttccaggctcaagccatcctcccacctcagcctcccatgtatctaggactacaggcatgcaccatcatgcccggctaattttttctattattttgtaaagacaggatgggtctcgctatgttgcctaggctggtcttgaactcctgggctcaggcgatgctctggccccagcctcccaaagtacggggattacaggtgtgagccactacacccagacagaaaaagtgctttttagaaattaaattatctaggctgggcgcggtggctcatgcctgtaatcccagcaccttgggaggccaaggcaggtggatcatggaagtcaggagattgagaccatcctggccaacatggtgaaaccccatctctactaaaaatacaaaaacttagccgggcgtggtggcaggcgcctgtagtcccagctactcaggaggctgaggcaggagaatcgattgaacccaggaggcggaggttgcagtgagccaagatagcaccactgcactccagcctgggcgacagagcgagactctgtttcaaaaaaaaaaaaaaaaaaaaaagaaagaaagaaattaaactatctgaactccacaaatgaagttaatatgaaacaaaatcaggttccaggtttttgtaaagaatctctaatcaaggtaccatgttgtatttctctcccttactctacctgacccctcctcagataaacagactggctaaagatagtgtattaaaagtattaatggcttcatatttaattacatgattattgctgacactgaaatgcatgactcagatgacagaatggtataaaacttttctaattaattttatcatagtagaaacttaaaatatatttgaaatacaagatttaatacattaaatatataaatataacttcaaaataattataacatcctcactaatttaacagaaacatcaatgtttaaactacacactaagggcaggacttctgttttaacactttttgcttgcctatttcccccaatcctgaaatatcttccatacaagtaagaaaacacacctggtttctgcctctgcgtttcccataattccttctgacgagggctttataattctcatttttcttggttaaatagtaatacaaaacacaatcaggaacactctgtaagaaataaaacaattatttttgaggatccaatgaaataaagaaattttttaattaaatattacttccaaggaaaatctctggtattctgaaagtaaaattaaagaaaaagaacaacatacattgctagcattttaaggcatatctaggctctaaaattatttacattataggtactattttaatagacagttacagttgttaatccaaattatgtgaaagatgccaggaactatcagaaacattcaaatattttcttattaacaagtaaattccctttctgattacatacatgcaaatttttaaaatgtctttaaatattttgttcaaaaacattaaaatcaactttatattaaatatggaatgattcacaaatttgcttgtcatccttgcgcagaggccatgctaatctctgcatcgttccaattttagtattatgtgctgctgaagcgagcacgagactgatattttaattagaaatttaatgaggctccaaaagcattgtaatctatgtgttttagggaaataaacatcaggtcatctttcattaaccatttagttctgtgttctgtgttacgatttctctaataattgtaattatcattacattaatcacatgagactcttcgcagtctttttaaaatcggttctagttaactacttatatgtgtcagagcacaagaatttcaaagtaacaaccatcacaaacctacaaacactcccaatgcaaaccatgtcttaccttcctctccaagtatgatgcaattagtccaaagttttttggatgctggataaacctgagtgaaaacgaaaacaaaaacacacttgcgtacaaatatttcaacaactaaaaaaaaaaaaacttgggaaaagaaagactatgtataggctgggcgtggtggctcatgcctgtaatcccagcactttgggaggccgaagaaggtggatcacttgaggtcaggagttcaagaccagcctgaccaatatggcagaaccccatctctactaaaaatacaaaaattagctggggatggtggcacatgcctgcagtcccacctactcaggaagctgaggcaggagaatcgcttgaacccaggaggcagaggttgcagtgagccgagatcacaacactggactccagcttaagcgacagagcgagactccgtctcaaaaaaaacagaagagaaatactatgtatagggctttctaactgccaatctgaggaacaattgtagaatcactggagacttttaaagggcacagatttctgggcaccatacaccaggaaatgattagtctacggtaatacatagaaatctgtactttataaaagctccccaaaagttcagccagcacccaagtttgggaaccactcttaacatgactccataaccccagttcttatctgttacctcttttcccacctataaacttacaggaagatcaatattctctacttttcacagtattgattcaaacaccaaaatgggaccaagtttttgtgaaaacagttcaatttacaagtaaatgccaaatactttttactaacttatgtagatgtctattagagaataatttaaaatataaattacttgtccttaaagatctccttttcatggtcagtccaaacattcataaactgcctatctttatacactttcatagggtcctccataagcccattcatgttaatgaacttgactcgtctttgttctgcatcaaacatcataggtggaatcacagagagctgccgcatttgtttctcattattctggaaaaaaaatacaatttacttagaataaaacataaactagaaatttaaggagggccatggaccaatgctcttaatgtgcactaaaaaaccatgtatgcagtttaataacaatagcagtgtataccacagcatctaacatacaataattactcatatatctaataaatattcactgtatgaattacagaggcagagaatatccatatcgttttttaaataatctactcctttgagaagaattcttttcttaaactaagctgatacttaacataataaaattttagacctggaagataaaaagtaatgtcaagttcactgaagtggtgaccttatggagcatttaattatcatattagtctcattttttaaagtctcaacatcattttatagaacaacttttaccgtcatattacagaacaataaatagaaaaataagcaaacaggcatcaaaatttaagtcagcgattttaaattaaactcactttactattaaacgcttcttgctaattttacatcatctttccattgaaaatttaaggttgttattcttagaaatgaagcttgtttcaactaaaactttgttacacgtgcagaacttatttttcccaaagtttaactgaggaaatttttaagtacaaacttctatttaaaagcttttacccaaattacaagtatttacccaaatataagaaaaggtatttccctaaaaattttcctcataaaagtggatactgcctaatagtcaagtccttacaaagtctctaatttcctgggacactctcaatcagtttgaacactatagtgtttagactgaaattacacattagattgaaattacctcaatacataaactaattttagatgcttacaaatgtttcctcatggaatcagtcaaagagcaaataaagaaatttaacagagatttactcatcattgtagaaataatggctacatattccaagggctgaatgtcatttcaatcatgtacttacagatgtttcctcatggaatcagtcaaagagcaaataaatttaacagagatttactcgtcattgtagaaataatggctacatattccaagggctgaatgtcatttcaatcatgtactttagaggtaattttaaaagcaatatagagtaagtggttatgttttaaagctcttgattatactgctacaaaagaaatgaaaaattgctgggcacagtggctcacgcttgtaatcccagcacttttggaggccaaggcagaaggactgcttgagcccaggagtccaagtctaatctgggcagtatagtgagaccccatctctacaaaataatttttttaaattagctaagtgagaggctgggtggggtggctcacacctgtaatcccagcactttgggaggccaaggcaggtggatcacctgaggtcaggagtttgagaccagcttggccaacatggcaaaaccctgtttctactaaatatacaaaaattagctgggtgtgctggcatgtgcctgtagtccctgctactcgggaggctgagggagtagaatcgcttgaacctgggacgcggaggttgcagtgagccaagatcgtgccactgcattccagtctggctgacagagcgagacgccatctcaaacaaacaaacaaacaaacaaacaaaaagttagccgggcgtagtggtgtaccagtagtcccagctattcaggagactgaggtgggaggatcacttgagcccgggaggtgaaggatgcagcaagccaaggtcacaccattgcactccagcctgggtgacagagtaagaccctatctcctatctcaaaaaaaaaaaaaaggaaaattcacttgtcctgatattatgcaatagtatgtgcaatatgtatttagggcttgagataaaatttagcaatgataacatcataaatgtattccaaaagaagtacatctccgggaatctgggcacagtgaagctggtatgctctggaacactgataactcaaaggtgtctctagaaatggctaagatcctgaaatcatataacaatgcactgaaaagcttgagtgtgggatatacctctgactaaatattgtaattgtccctaaagagttatgtatttcaatgcaccaaaaatcaccttggaatcctctctttgggaaaggagaatatcagaaataagaaaggaaagaaaaaccacctgtagaagtctattttgatcagtataagaacaatctgagaagtaaaatggtttaaggaactctgagatatagtttatatagttctatacctcctccagggctagtttaactagaattctgaaacacagtaacttataagagcatactatatacttttataagagcatactatatacttttatttagttatgaatgcaaaacagggtatcataattaaatactgatagaatcctacaacatatatcaacacaaagacaaactctgtacaaagaggctattttttcatcctggagaaaaacttactgcaactgtctcacaagtaatttttcatgagatcaagcaacttgatggtttaatttaccattgtattcccaatgcttaaaggaaagtttggcacataataggctataaatatttgttgaaagaatagacttgattgaatatagatatggaaaagaacacacagttccagagtcagactgcctgggttgagtatctggctccactatttattaatttgtaaccttgggtgaattatttaacctgcagctgggctttagtttcttaacttgcaaaacagccattaattatagcctccatttcacagaattttcacagtttaaataatacatatgaggtgcttatcacaattggcaattttaagtagtaactacccctcaaactccccctcctcaaaaaccaaagatgtagttagtccaccataacctaaaccaacaatacccatagaaaaaggagaaaaagtactggctaggttaactagtagtaaagggtagagcagaggaagtcataacactgctttttacttctaaatgtgctaagtagtatgaaaacaggaattttacttatctaaattatttctaaatcattgaacattttagattaaatccacttcacctaattttgcaaatcgagtattaactgtatatttaagtctacttaacatttattttgaagtatacagcatggtaaaaaatatctttgatcattacttaaggccactatttcaaataaacaagactctcagaattttgagatgaggtttaagaaaaggcatataataaaatcaaaactagcaaaactcagtcaatactagatggcttttggaacaatcttgagagtttgaacagggctaaaaagattcaatgttagaaatggaaatttattcttattctgcatttatttattaatatccaattaaacactaggcaacaggaactcaaagatagcctgacccaaaggtttaaaataaccgcactcatgaagatgacactttagctgatcataaatatttattaaacagaaagagaagcacaatagaaataaatgtaaactgagactagacattgagttctgttttgggaaagtgagtgaggaagcttcacaagggaggaaatactgcttttgggtctgaagatatatttgtcaaacatataccttggtctctactacctgtttcataattttattaattctgctctttatacaggcaggaaatgcctgaaaaacaaagtaatgccacttgctacaacacagtatcttcaccttaaaaattagtgaaatggcgttcttgttcatagatgaatctcctccatatataaacttaatctctatattctcattcacctgcccctttcacttcatgttaccatacttacctgggactatatcacctgcagacagatgactctgatatctaaccatccccagttcaactctctcccaggttcacttgctagacaacaccctttgaagaacatactgccatttgtaaaatacatgctcctttgctactttaggaaacggcaccaccagcttactcctctaacctagaaacaagggagtcacattctattcttcctctttctcatctcccacatcccatccatcttggcctgtccattctacctttctattacactcgcctatacatccctaccactgttgccctgattcagaaccttatttttatcctaacagcctcctcacctctctccaggtctccttgctgccaaagccatctttgtaaaattccagtatgatcgtgtgactgcctcgtttaaaaaccctttaacagacactcaaatctttgacagtctaaactctagcactcaattaagttcccacatttacatacaaaaaaacccttagctcctacagagttaaaatgctttaataattaacgaattaacttgaattaaatttattttcttacctcctgctcagagagcccatcaataatttcagaaatctcatgctcactcctagcaatggtggctgaaagaccagctcccctctgcccaactctaaacatgagggagaaattaaaaatatatttaaagaccttatataaagacatatcaattaaattaactatagattacttttctgaatggaactttttaaccaagttaagagaagaaacataaaatactattgagtatatacttttaagtaatatgctgtgtcacctattaataacaatttaaatgttacgattgagatttgaaggttacatgttcatgttcaaatggtggaactagttagggaaaacttctagaaagtcataattattgatgccaattccatttcaaatggcattctttgtatgccctgtagtagacttagaaaaatacatgaaacatttttaaaaggagagaaaaaactcaaccaacatcccttacaaaaatttaattgtgagttaaggggcttacatgactcttacatgagacaataaaaaagaaaattaaagcttttaaaatctttgtaaaatatctgtttgctaaaagtaaaacaaatcagaatctatcaaagaatttcttaattggccatcagctgaatatagtttgaatatgttggtaacgaaggactaaaggatatttaggtctgttcttactcactgtcatgtccaaaggatgtaatacttttaggaacttcagaattaatttcaaaataatcacttacatttagattcaacaggataatataaaaattaaatttactaagacataatgtttactggttgataataaagttttcttttcaacataaaagttcttttaacttttaagttagtgggtacatgtgcaagtttgttatataggtaaacctgtgtcatggggatttgtcgtacagattatttcatcactctgctattaaacctagtacccactagctatttttcctgaaccctctccctccttccatcctccaccctccaccttctaataggccccagtatgtgttgttccccctatgtgtccacaacataaaaattctttataaactttcttcatgatcagtttcaagaaacaatagctctccctctccctctctctcctctccctctccgcttctcccgctttccacgatctccctctccctctcctcccgctttccacggtctcccctctacctctctccttctcccgctttccacggtctccctctgttgccgaagctggactgtaccaccatgatctcctccctctccccttctcccgctttccacggtctcccctctccctctccctctctccttctcccgctttccaccgtctccctctgttgcggaagctggactgtactgccatgatctccgcttgctgcaacctccctgcctgattctcctgcctcgtgcctgggattgcaggtgcacgccaccacgcctgactggtttttgtattttttggtggagacggggtttcgccgtgttggacgggctggtctccagctcctgaccgcgagtgatctgcccaccttggcctcccaaagtgccaggattgcagacggagtctcgctcactcagtgctcaatgttgcccaggctgcagtgcagtggcgtgatctaggcttgctacaacctccacctcccagccgcctgccttggcctcccaaagtgccgagattgcagcctctgcccggccaccaccccatctgggaagtgaggagcgtctctgcctggacgcccatcgtctgggatgtggggagtgcctctgcctggccgcccagtctgggaagtgaggagcgtctctgcccggccgcccatcgtctgggatgtggggagtgcctcggccccaccgccccgtctgggatgtgaggagcgcctctgcccggccacgaccccgtctgggaactgaggagcgtctctgccccgccgccaccctgtctgggaggtgatgagcgtctctgcccggctgcccagtctgagacgtgaggagcccctctgcccggcagccgccccgtctgggaagtgaggagcgtctccgccccttccgggaggtggggggcagcccccgcccagccagccgcccagtccgggaggtggggggcagcccctgcccagtcagccgccccatccggggggtggggcgcctccacctggccgctgccccgtctgggaggtgtgcccaacagctcattgagagccggccaggatgacgatggcggttttgtcgactagagagggggggaaatgtggcgagagtagagggagatcagattgttactgtgtccgtgtggagggaggtggacatgggagactccattttgttctgtactaagaaaaattcttctgccttgggatgctgttaatctataaccttacccccaaccccgtgctctctgaaacatgtgctgggtccattaagggttaaatggattaagggcagtgcaagatgtgctttcttaaacagatgcttgaaggcagcatgctcgttaagagtcatcaccactccctaatctcaagtacccagggacacaaacactgcagaaggccgcagggtcctctgcctaggaaaaccagagacctttgttcacatgtttatctgctgaccttccctccactattgtcctatgaccctgccaaatccccctctccgagaaacacccaagaatgatcaatacatactaaaaaaatttttaaaaaaaagaaacaataaatatttgaagaaaaatatcacagtcattaaacatcaaactactcaccgctgaaatctttcttgctgttctctttgttttcgaatttctggaaactgcttttcatagtattcccttgttttgctttctttagctttcctccgaggattattttctattctgtccacttttttctcccatgcctccatgagctgatcataacgctggcagattttttgttcctattaaatatccgtagcaaattaataataattaaactaaactctgattctgacaaacctaatactttaaaataaatgctacttcttaaggttaagtcagaagtacatttggcttatgactcaactgtgaacgaaaagcacaaagaggagagaggaaaggtagctctgtttcctactaagatcaacacatagagcacaggttggctggattttttagttaacattaagactatgcatatttataaactacttgacacctactactagtagtagctgaccagttacttttattttgcttaaaacattatgtcattgttgtcccaaaaaaatggaaaattaaaaatacaaacatgtaaatagttcataatctgaccaattacccaaaggcaaccatatgaacattttgttgttatccttccaatctgcgaaacaaaacacacacgctttaaccgatctattattggaggttctggttgattgccattttttgctataataaataatgctatataacaaacattttgacagtatgaaaaaggcagaaaatggttggttgtgctttatcataaaaagaaatccaggctgggcgcagtgactcacacttgtaatcccagcactttgggaggccaaggcaggtggatcacaaggtcaggagtttgagaccagcctggccaatatggtgaaaccccgtctctattaaaaatacaaaaattagccaggcgtggtggtgggcacctgtagtcccagctacttgggaggctgaggcgggagaatcgcttgaacccaggaggtggaggttgcagtgagccgagatcgcaccactgcactccaacctgggcaacagacaaaaacaaaacaaaacaaaaaacagaaatccagtgaactacgtgaaattgagaattaatgcttttagagaagtaagtgaattatgataccattttctaaatagagaagaaaagacagacgaaccctccattatggacaaagaactgtcaacatatctgatgacacatggacagaggaaagtgaggaagggttcatgaaaaactgctaacatggtcatcttaagaaagtggcattggagaacagaatattatctttctcacattccacaccacaccccactcccacttctcaattactcctatatgtcttctgtgtccttcatcttttctcctttctactgctacccttataatccaggccaacaccatccctcacctagatcaaaacaatagctcccatgcattcttaatgttgtagctaaatgcaaattcttttttttttggaaccaagtttcactcttgttgcccaggctggagtgcagtggcgcgatctcgctcactgcaacctccgcctcccgggttcaagttattctcctgcctcagcctcctgagtagctgagtttacaagcatgcgccaccacgcctggctaattttgtatttttagcagagacggagtttctccatgttggtcaggcgggtctcaaactcccgacctcaagtgatctgccctccttggccttccaaagtgctgggattacaggcgtgagccattgcacctgccccgctaaatgcaaactcttaaaatgcaaacccaaacattatgcaacctccaggacagtatacaacctggctctggcttccctcagcagcctcatttctcaccacactgccagctcagtctacactccctctggctcccagaccttcacttaagccactccctctgcgtatacaagtttgcagagaattggttttcccctgaaatgtcccctcataattcctatctgccttaggtgtcctcctcagtcatccgtagtccatgaccacggtgtgatccaatactaggactgacctgtctgacttccatcaccttaggctccccctaattactaaaaccatatggctatcttgctcacctttgcagaataatatatgggacagagtacacagccaagtgatatttaagcaaatcggtgaaaatacaaaccttacagtgtttgcatcaccagtgaacttatttagtgagtaccagaattacaacaaaattacttggaaaggaaaaaaaaatacatgagctaatttcttacttgatatttatatgttcttggcaaaaaaaaaaaaaaaaaaaaaaaaaaacaactcaagaccagtaatttaagacagtatctgatcagactggcaaattagaacattagacgttttccaccaaataaagctgctgactcttgagctttacaactcaaactgtcaggtcattaactttaggcacaaagttcatttttgatgtcgatttaaagagtagcatttatttagcagacacttcagtttaaatgtattaacagtgtatctgtaaaattagtataaacatattatgaaaataaaatcactggcattatattttctataatttaattcccatgaaaattatataaccacaaaacttttggactgcaagtcataaaaaaatatggaaaaccatttgaatttgaaaaagctgaaccctagctgaccccgtttctaataaaagaaagaatagtaatgtctcatcagcatgactgcaacttacctacaactgtttgaggcttaagaaactaaattatctttcatattcttttaaactactcaccgttttattttgactaaatgaaaatgttctagaaagatgaccaatgaaattaatttgataatattaaatgtaaggtatggtatcaaaatgttactagaattagatttaagtcatatatatatatatatatatatatggttactttctaaatcagcacttatcctcaaatggagtcaaggaccactctcattaacagtaggaaagtgaatgcctaaatgagcatgaatgggaaagctgtataaatttcagttaacaaggataggacctcaccctttgttttcttgcatgatttcttcttttaaaaaataaaatgagttttttcctcatcacctggtttctagaagagaaaaatatggttgcatgacattaagaaaaagcacaatttaataatgcattcactttttttccagagacactggaaaataggcaaagatcacttaagaatttatgatgtaaacaaagttaatcctaatttttttaccctgcaaaataagattttataacttttgcaaaaattagaactgactaaagttcctcccattctacagtaagacttaatacaaaatagttaactttcaattagcacatccaattataaggcaaatattttcaaattaaaattacagttacttatccttcttaacaactctggtgacataaacatcttactctttggagaagggaggtagaagagaaggaaacatttttacagttacctccctacatcaggtgctaacctcccttctacgaggaaaatgtataccaacatatgtagagataggtgacttctgctttaaacagaagattttcttcagtcacagaatgacacaatccactctaagaagtaatggagggcaatgtgtcaaaacaggaagatttctaatatatcttaatcgctttttaaattggaagcattgtgaccttcaaaaacaatgacatgcaggttcaagtataaatatttataccccacctacttccagaaaggatttcaagctgattattcaaatataaatacaaagccaaggcaagtagaagtaattttttggattatctgccactcaggactaacagtgacactggctccactcaaataagtatggacaagcaggagctggctatatgaaaaagtagccaagagatgaaaagaattattaaaatgtacatttgctatttcatacaaagcaaatgacggtgatgaaagaatagctactgaatgactcatacagatgcatgcagctgaggaaatattccaaaaggtgtcgtacagggaagcattaccatatactcagtttgctataattttaagtatacgttactcaaaagcaaatgacaatcaacaaatacaatcttaaatgtttcctaggaatttaaatgaagtcagccagtcagtagtccatctaggatagtgtgctgagcactaaataggcaatgtagatgacatgaaataaatcggacagagctgctctccagactgtatcaggagaaacaggacacaacacaaacataacactgaggctttgtgggaaaaaaaaaaaaaagtcattaagtagccaactagatcttatctgctcttctactctttaaaaatgttaaaacagctaagcagttccaaagcaaggtatattatatgtgagttttgactaacttacttctaagggttctcaagatcatagtagcatctcacagaaaaattgacaaatacataacttttattatgaaccacttacttaacaaaagttaaaattattcaaattcaattgttttcatgcatactaccatgcaaattatatttgccaccagttctgcaaagtagtcaataattgcacatactctcagttaagaaatttttaaaaagaaaaaaataaatatatatatataaaataaatagcaatgtgctcattagtaaccatactagtaaataattatgttctgcttatacttaataaaacatataaagtagaaatatcacatttttgtcacaaactaagaataatgcacctaaaattctcttaaagtataattttttttttaaaaaaaagatatctatctagcttcctctcttacttcaatcagatcaagaaattagattttcttttcacttattttcttattccaaaatctgcatccataaaggcctggtactaggatgagcaaggctaagcaaactacattctggagcagcctcgtcacccacaaggtgactgagcgcttccaaggcaccaggacattaaatggcagaagggtctacaaataccgtcattagcaagagtcatggaagggatttccctagaataggattttgaataatgataaaatgatccgtggcacttctactttgcaatggcagatgtggcttggtgggggacggtgtcatcactagtcttaaatgaaaaagcttcattatcttacttcatcatgcgccttgcaggtactccactgaaaaaaagacaaaacaggaggcaaaaaattcaagcctcaaggtaagccatttcaatgttaagtatccaccttttttactagcagattataaaaccagctagttttatgcaataatttatttcattttttggcctcggaaactcaaagctgttaccccaacccccaagaagccagaggaagataacatataataaaacgacagcaaattacacaaatctaaaacatacctacaatatattataataatgtcagcagataacaaaaatgatctctttatagaatatacggtctttaattgaagaactccaaagatgatcaatacttacgtcttgatgttctcatggtacaccttggtatctgatggctggttatacagtggctataaaagaaatcaaatatttatgtataaaatgttgtacatatgtctatgaagagacaaagaaacataattttaatgtaagcacaggtaaagtactaatggatctacacaataacatgccctaccaaaacctccaaacttttatttttttatttacttatttttttaaattatactttaagttctagggtacacgtgcacaacgtgcaggtttgttacatatgtatacatgtgctgtgttggtttgctgcaccaattaactcatcacttacattacgtatttctcctaatgctatccctcccccatgccccaccccctgacaggccccggtgtgtgatgttccccgccctgtgtccaagtgttctcattgttcaattcccatctatgagtgggaacatgcagtgtttggttttctgtccttgcgacagtttgctcagaatgatggtttccagcttcatccatgtccctacaaaggacatgaactcatccttttttatggctgcatagtattccatggtgtatatgtgccacattttcttaatccagtctatcattgatggacatttgggttggttcccagtctttgctattgtgaatagtgccgcaacaaacatacgtgtgcatgtgtctttacagtagcatgatttataatcatttgggtatatatccagtaatgggatcgctgggtcaaatggtatttctagttctagatccttgaggaattgccacactgtcttccacaatggttgaactagtttacactcccaccaacagtgtaaaagcattcctatttctccacatcctctccagcacctgttgtttcctgactttttaatgattgccattctaactggtatgagatggtatctcattgtggcaaaacctcctaacttttagattccctgagtaactgttaatcccatctcctgtcactcccataatacagtttataaatccattgtttcccataagtatatttatgcacagatttttaatttcaaagtattaatactccctaatactagggagtattaaccattgtcactattttaacagtaacattcaaagagctttctaattctgttcttaattctcattctgcctggaaggattaaatagctgctcaagcaaaaacaagctcagggtgatgtttctgcaaaggtctgcaaaggtaaccaagttcactcatcattactttaaacttcatctcaagctacatctctgctcagctacatctctcttatcccaaaataaatggatcatattccatcttatcccaagaaaaactaccaccaaaaattaaaaaaaaaaatcactggaaatgaaaaaatttacttaccagttcaacttttgggccaagaccttcaaaaattttatgagcttcttctgcttttttctagagataaagacattgttgtatcatataattaaaaattacattatctaagtgcaaaataattatttagaaatatttatctaagactaatctatagatgaacttatccttatttccaaatatccttcttctatatgacaggctgaaatatgctccagttattttttattttttcttaatttgtagttacaatgatagaaaactctgaaattgtattgtcatagctttcctcaccaaattcagtcaaaacttaacatttgtattgaaagcaatgcctgaataataggtaagttttaaaaaagcaaacaattatattaaaaaactggagagagggaatgaaaattcactattagaaataaatcccccaaacattctacatactttaactcatatcatctttaatagaaacttaaagcaataaaataccataaaatggccactctttactatggtgagcaacattgatctctttgaagaaaagctgttaatgagctaattttctagttacaaggaatccttagtaatagctgaacaacaaagaaaaccgctaatttgaattattcaaagtgctcagtagttaaaaaatgctgaattatatgtatttgtaatatgctatttcctttttttttttttttttttttttttatttgagacagggtctcactctgtcgcccaggctgggacacaatggcacgatcatagctcactgcagcctcaacttcctggactcaaataatgcccccatctcagtctcccaaagctctgggattacaggtgtgagccacagcacccagttgctattttcaaaagtaaaataatccagaccaaagtgttacctagcaaaaatcttcccttgctaagattaatctatcaatattttggcaacaaaaattttaacttaagaccctcatatgttcgtaatacaatttgtattctaagtctacagatagaagtaaataattcttcaacatatgttcggtatgttctatgtgccaagcactcactagacactaagaaaataatgaataagataagccttcccaccacaggaagatgaggggtcttgaaagtcttcctagagaaaatgatacttgaactggggcttgaggtaacagtgtgcttggcagaaaagacaaaacacggggccacctgacagcaggggcaacatagcggggtaaagatattgctaacaagggaacatccaaaacctcttctggtgggatattactaagaaaagagtatggggcaagggccaggcgggtaagcatgtaaacatcaataaaggcttcggctattctgtataaagtgggaaatcataaaaaggttctatttggagaatcattaaatgggacgaaaatatgaaagatgggttagaaagaaaggactgaagcgtgagactcaataactatgtgggagatgaaggctcaaattaagctaatgataaaggtagaggaaagaagcgtaagaccagaccaatatttaggaggtgggactaacgctcttcactgattacctcaacatacatgaagtggcaaagagagagaactggataattcctaggatgctggcctagatgaccagaggtgctggcacagaatatacttcctaccatcacccttttctttcttctgaagtcacattctcttgcaaatcaacccgtcaaaatataaacaaggcaggtcatggtggctcacgcctgtaatatcaacactttgggaggcctaggtaggtggatcacttgagtccaggagttcaagaccagcctgctaacatggtgaaaccccatctctactaaaaatgcaaaaattagccaggcatggtggcatgtgcctataatcccagctacttgggaggctgaggcgggagaatcacttgaacccgggaggtggaggttgcagtgagccaagatcgtgccactgcactccagcctgggcaacagaacaagactgtgtctcaaaaaaaaaaaaaaaaaaatacacacacacacacacacacacccacaaagatattctgcaaatttctctagtagagcccaacaataatcacttttctatacgtattattcttctgaaattagaatatttacaaatatttttggaacttacaactgatagggtaaaatcaaattgaactgttaaaaatagtctgtttagagactaaacaaacttagactgaaatttaactatgatgcaagtcaacttttctcaggaagtcaactttaaaattaacacgttggggcagtttttttcctcccactacctttctaaataaaagaaatggtccctcgatctcttaagccacacttggcttaattccaactagtgtaactgctgccacccaagaaataagagggaggtgtacttctgtaattaccccattcctccttgcctatggtgctgaaacagataagctcattcattaaaaaatgttaaaagaggcagggagggcctttcaaaaggcagcatactggggcagaaaaagccttggggagtacatatcagaaagcctgggttctaggcccattgtgctctcctcctcccctccgggagctccctgttacaattctgaaactgcacaggtacatgtataaaacatacataagaaagaaaagatgaggccaggcatgggggctcacacgtgtaatctcaatactttgggagactgaggcaggaggatcgcctgaagccagcagttcaagacctgggcaacataatgagacactgtctgttagaaagaaaagaaggaataaaagaaaagaggcctggtgcagtggctgacgcctgtaatcccaacactttgggaggccaagatgggtagatgacttgagcccaggagttcaagaccagcctggccaacacggtaaaaccccatctctactaaaaatacaaaaattagctgactgtggtggctcacacctgtaatcccagttacttgggaggctgaggcaggagaattgcttgaacctgggaggtggaggttgcagtgagctgagattgcgccacagcactccaacctcggggacgaagcaaaactctgtctcgaaaaaaaaaagaaaagaaaagaaggaaagcgaaaaaaaaaagaaaagaaaagaaggaaaggagagggaggaggagggggagaaaagaaaggagagggtggagaagaaaaatgaaagaaaaaagaaaaaaggaaaagaaagatgacttctatagttgttgtgggttagaaacaatcttcagtgtaggaaggcaagtttaacactgaaacaggtttcagatttggttttcttcataaaataaacaacaaaccaaatatggaaatgttcaaacagaaagaagaggtgcaaaaggagttttcaagttttgctaatgtgcaccaagaaacactatactaattaataaaaacatctatatataaaaattaaacaccaattaaattctctattagatcagatcttgttcaatagtattcagtcctcaaatcccagtgaggcaaccacagaattcactaatattgtaagacaaggctcattaataaatccattaataattattaccaaatccaatttatttgaaaaataattcatactaaaaaagaaacattttataaaacttaaaaaaaaaaactatcaaatctccatttgtatcaccactaattcctatttattttatccctgaggtcacagtcacaaactggccatggagcccatgagcccacaaaagtgttttgcagctatgcagaggactttttttttttaaaaaaacaaatcagagatttcacataaaaccccattattttgggcttttcttaaacaagggagcaactgtatatcctggaacacagcccccatcttaggcatggtcacctccttcccttcctttactggatttatcttcatgtagactgctgtggccatacaataaattggactaatattgaacccagccaagaaaataatattaattgcccatatttttacctgcccataacacttaccattaccgtaagtatatttctgatgactctcagttatctacttgatacatgtatatctaaatccaagatcattcctataaatgtgtatttatttatttatttattcaacttttaaattcaggagtacatgtgcataaatatttattaattcacaattgctttatttaaggtcaatttcctttcggctgtggactactataaagttacagactgtatgtgtaagatagactgacagatgaatccactcactacaaatcaaatcaatcaaaacaacaatcccaaattttacctgatgatcatgcctttagctaaaaaccctattctatcccacagtataaagcatattatcattttttgcactgtggacttctggaagcccactgttaaacagacactttcttcatgttgaggtaaaatcagtttccctctaactgctagttcctgggccatattctggccaaaactaactttgatactacaaaaatgattcatagaattcatgcctggtgtttctgaatccatgaatatttttaattaagagtatgagagtaaacctaaaaaagcaaagtctacctaaaggtcaaaatctaccttgaactttgattttttttttttttgagacttgagttttggtctgttgtctagactggactgaagtggctcaatctcggctcactacaacctctacctcccaggttcaaccgattctcctgcctcagcctctcgagtagctgggactacaggcatgcgccaccacgcctggctaatttttgcatttttagtagagacagggtttctccatgttggccaggctggtctcgaactcctgacctcaagtgatctacccgcctcggcctcccaaagtactgggattatgggcatgagccaccatgccccgccttgaactttttaactgaagttcaaaccatagcccaactatcgactgtgaactaatgctgataagaaagttcatttccacatgcaatgacctatctttactgaaatgttatcagtagtcagcattaaacatcatttattaagtgaaaaactgcaggatggttgttttgtattatatgctaccaagcttccttgccagaattcatataataggagactcagctgacaaaatttcactgattaaatatttataaaatacataatgtaaaatgaaatattacataatttaaggcacaactgtaaactttctttcaattgataaggaaaaaaacaccaagcttcagtcagccaaagtttatgaacattcaaaattgtaagagaaatcaggttttaataaagttaaaattataccaggatacattcaaaactgaaaagggcatcgtcaagtggggttaaaggcctgtgctgccagagatggtatgagcttacccgattctcatcataaataatttggacaatactgcggtgtttctgctccacaggaggaggggacacgggcttctcaggctcaggaggtttagctgcctcttcttcaagctgttgctaagagatccagaaagaaagagtcaagcatgtgctgcacaccacacccagcagtgattaaccactggagataacacaggctactaagctttgcttgcagattctgtagggtaaccaattaatccatgaaggtctcatggaccaagagctcaaagagaattaatcagatttatttcataaccaaacaacacaaattttcattagatagagtttaaaaaaaaaaactaagaggaagcatcctttaagattttaattctgggccgggtgcagtggctcatgcctgtaatcccagcactttgggaggcctaggcaggtggatcacctgaggtcgggagttcgagaccagcctgactaacatggagaaaccccatctctactaaaaatacaaaattagctgggcatggtggcgcatgcctgtaatcccagctactaagaaggctgaggcaggagaatcacttgaacccgggaggtggaggttgcagtgagtcgagataacgccactgcactccagcctgggcaacaagagcaaaactctatctcaaaaaaaaaaaaaaaaaaaaaagattttaattctgacaaacttaaagcaaaataataagagaagttaaatttaatgaaggtactctacatacctctatcacaatgacctttgacagcactgaaaaaacactcttatatgttatagatacacagtatacattaatatttgctgggcagaatatggtagaaaggagatcaagggttaacccttaactcagcatggcaccatgccaccctcaacacccaatcttcatgtgttacagtgctccggtcaaagggcaatcaacaaaattacaaaaatatagactattggtgtgtgcaagtataaagaaaaagctaactgtattaccgtgcctgggtttgagcctcagggtcaccctttacaggtggtgtgatcctaggaacctttctgggtccttaggtcaatctttttttttttttttgagatggagtcttgctctgtcaccaaggctggagtgcaatggcgctcactgcaacctccgcttccagggttcaagcgattctcctgcctcagcctcctgagtagctgggattacaggcggccaccaccatgcccggctaatttctgtatttttttagtagagacagggattcaccatgttggtcaggctggtctcgaactcctgacctcaggtgatccacctgccttggcctctcaaagtgccgggattaccgctgtgagccaccacgcctggctcccttaactcaatattaagcaaacacctaaactactcataaataaggtagggataataatactacctatcatacagctttttgaaaggactaaatgacttaacgtatatataaagcatattacaattataaattgtaaatattaccgagtattactagtgaagcaagcagggacttgtctgctttgtccgctgctttttttcaacacctaaaccagtgcctgacacctagttaatgctttaaaaatatccacacgaataaatttagcataagtccactacctaagatgataaaagaaaaattaggtaaagacaaattaaggttaagtctagtatagtctataggcaaaaattatctatactactaaataagactgataggccgggtgcaatggctcacacctgtaatcccagcactttgggaggccaagacggtagatcacttgagcccaggagttcaagaccagcctagccaacatggtgaaattcctgctttattaaagatacaaaaaattagctcggtgtagtggcgcaagcctgtaaccccagctactcaggaggccgaggcagaagaatcgcttgaacccaggaggtggaggttgcagtgagccaagatcgcaccattgcactccagcctgggcgacagggggagactccatctcaaaaaaactaaataaataagagtgacagtcaaagctcccagtactgtaaatcagaccatgcccaaatgaaagcataaaaatctaccaagagggagtttctgaacctattctggctcaggaggctgcccaattcgaaaaaaatttaaaaaaataataataaatagccaccaggagagtctaaactgtaaggaacacttccactttggaattataagtactcttgcagtctgttatctgtacaagcaaaagaaagatatttgaaattctgagatcatttttatggtaaagggttcttcaatgattccctttctttcctgcttagagggccttcttttagaatccttgttaaggaataaacaaatcacactttgttcttagtacccaaatagccctgggacaaaaccattataattcaaaggctaaaagcaaacacacacagacacacacacacacacacacacacacacacacacacacacactccctcacctgtttttgtttttgtttttgtttttgagatggagtctcactctttttgcccaggctggagtgcagtggcacaatctcagctcactgcaacctctgcctcccgggttcaggtgattctcctacctcagtctcccaagtagagtagctgggattacaggcacccgccaccacactcagctaattttttgtatttttagtagaggtggggttttgccatgttggccaggctggtctggaactcctgacctcaggtgatctggcctgcctcggcctcccaaagtgctgggattacaggttgagccaccgagcctggccctgtttgttcttttacattaactttacaatgtatttgccatgttttaaaaataaatttaattgaaattttattgaaattgtgtgagacatgatttagtccaagatgaacacagaacattattatcactgtttccatccagctatggcatatttctttgttttctctagttgtcttttatatctctcaataaaatgtgtggctctggtacatttcataataatcatacattatatttcattatttctaattattatagtggattgcatgtacatttactatgtaccagatattatgcaatatattcattatctcaattcataaaacaatcatgtgatttagttggtgttattactagattattaccattgtacaagtaaagaaaataaaagacaaaagaaagaaaagaaaagagactcagcgaaatcaaaccagtaaagacttaattagaattgttgggcatataataaaaatttaatacaactcaatgaaagcaaaaaaaaaattttttttaatgaccaggcagatttgagaaggagccaaacagaaattccagcaataaaaacatagttgttgaaattgaagacagatttgacagcagattacatataattgaaaaggaaaatgtaaactggaagacaggctgaagaaattgctcagaatgaagcccaaagaagttaaaaataagaaagagaaacaagagacacggaagacaagagtgataagatgttacaactaacaggaatttcataagtagaacaagaaactgttagaaaggttttctaaaaaagataatggcttggaattttcccaaagtgatgaaaaactccacccttcatattcaggaatatcaggttggacagatttaaaaggaaaaaaaaaaaacacctaaatgtatcatcataaaaataacagaaccccgaagaaaagaatatactgaaaacaacctgagagaaaattcacactatccatgaaagaatacggatttagaccaagagctaatgtcttaaaaatggaagcaagaagacaatgtactaagaaaaaataatcacataccaaattaataaatatatcttttaataaacaggccaaatataagacaatatttaagtcataaaaaccaaacaaatactgaatttgccaactaagagaccttcactaaaggaaattctaagagatgttcttcagtagaagggtgttcccttcgatggaagacttgagttgcgagaagaaatggtgagcacataagaagacaaatatgtgggtaaacataaatgaacactgactatacaacatgtagtttccagtggattaagaataagatgagaagcaaaactataaaacttctaaaaaataatatagtaaaactaccttaataaccccagggggttttcatataaaacctaaacaaattctgttcaccaaaaaaaatactatcaggatcaaagactcaaatataagaggtaaaactataaaatgtgtagaagaaaacacaggtataaatctgtgaccgcgaattaggcaatgggtcttagataaaacaccaaatgtaagagtgacaaaaggaaaaaacaaactggacttcaacaaaattcaaaacttttatacatcaaaggatactaccaggaaagtgaaaagaacccacagaatgagagaaaatatctattaagtcatacatctgatgaggaactaatgtccagaatatataaagaattcttagaataacaaaaagacaaccgaattaaataatgagcaaacaatctaaatgaacatttatctaaaaagatatacaaatggccaatcagcacatgaaaagatgctcaacatcattagtcattaaggatatgcaaatgaaaactacaactagataccacttcacatctccaaggatggctatatttttttaaaaaaggaaaataacagatgttggcaaggaggtaggaaaaaatggaacctccatatactgctggtaagaatataaaatggtacagagactttggaaaacagttttgaagtttttcaaaaatttaaacatagatttaccatatgcccactcctagatatataaagaaaattgtaaaaatacgaccacacaaaaacgagtacatgaatctcatcacaatacatcactaatcatagtcaaaaaatgaacacaactcaaatatccatcaactaatgaatggataaacaaaacatagtaaactcacacaatgggattcaggcatataaagtaatgaagtgctgacacaagatacgacatggatgaatcaggacaacatgctaaataaatgaagccaaacacaaaaggtcacatatgattctgttttttctgatatttggcacatgctagtccatagagacagagaatagactagtggctgccaggggttggggaaaaggggaaatggggagtaactgctagtaggtatggagtttctttttgaaatgataaaaatgttctagaattagagagtggtgatagctgtacaactttatgaatacattaaaagcacttaaagtgcctatagtcccagctactcgggaggctgttgcaggagaatcacttgaacctgggagacagaggttgcagtgagccaagatcgcaccactgcactccagcctcggtgacagagtgagactccaaatctggaaaaaaaaaaaaaaatgcactaaaatgcacttagtctacacttagagtgaatactgggctaaaagtgaagtgacaggccaaaaactaggcaaatcttctatacacatatctgacaagggacttcaggaaatcctaaaaatttcaatgacaaaataggagactatagacaaaacgcttgaacaatgcacataaggaacccaaataacccataaacaaatgaaaataagctcagcctccttccaaaccacagagaagactatttcatatccaactgaaaaaacgatatcaagcaaaggcaaaaatgtgcacaaaccggtactcacataagctgccagtaggaatgtaaaatggtgttacttcttagcaaatttagtatcatctattaaatagttcactgtacataatcttgggccaagcactgccattcctgggcacatgccctagaaaatctctacatgtgaaccaaaaaccagcaccattgtatggaatagaaaaaaaaaaatcaaaaatagaatggacaaacaaatttcactctctacaatcatataatcagacagtgcagcaaggaaaatgaatgaatgtaagaaaaccacaacagtagcaaaaaaacagcaagtccgaatatataaggcatgattccttttatgtaaagtttcaaaatatggaaaactcaaaaatatctactgtagggagacaaacatacattcttagaatatattaagcaaagacatttacttgtttctttttcagtttaaggatctgctgttctacttttgcaatttctcgatctacacgatccatactctgtattaactcttcctttgagagttttgaaggtgaagcattttgatcatctccacatggttgccccgaaattggagaggatggagcttcatgtttgcctccgaatgctggatcctttagagaataaaaccaagaaaaacaatttatttctcactaatagagtccagattgccttaaatgaaaaagtcagttttaaaccacagcagagccatgtgtactatttgtctaatgaaacttttagtagtaactttcatattcacatacatgcaaattctcacctcacttttatagtttagatataccatgtactattttgaagaccctaaaagctatacaaagtgaggtgagttagtgttgatcagcctctagtataacaatactgaaattatagagaatttataggtaaataatgcaatcatgacaaaggaagataccaacttctcagccatttccttgcaacggctcttcaaatggtctgaacaactggctgggaaatagtattattccaggtaaaacctgtgtgtccacccaacttaacaactataacatggccaagtgttcctatcaaaagtttttaggctttccaaaccaaaactgaggtacacaagtcagagaagtgacctaggaacttcagttgctactatctctaggcctactttcataaagcccacactacagcatacataacatttccttagccaaaaacatcccattgtgcctccaaatcagcagagctgtagcagaatgaaagccgcttcacccaaaatccactaccctccaacacacatccacacacaccctattaatttccagtctgctgtaaagacataagcaatattataaaacagataaattttagagtactaattttacttagactatgagaaacctacaatgagggtagttcacaggattacagaaccctaaaatgtattaaataatgattaaggaactgtgaaaagtcaatagttctgagtcaagaatgcatacaagagataactggacagttgcttcaaaacaccttagtacagatatttcagctaatatacactgatgaaaagcctcatattctctaatagtatgcgctgaatctaagaggccttctgggaaaataagattatggctataccctaaaacctgtacaattctgtaaggaaaacaccaataaaagcaataacaactctaatagacttaatagaattaaagctccagtatcctttgcatctggcatacagtcaatctttggcagctttaagccctagagtttatgattcctctcttaagatgtaaatccttgaggtcattggcttccaaaataaaccagtatgtttcatctaaataaaatatcagtggccaggcacagtggctcatgcctgtaatcccagtactttgggatgctgacgcaggcagatcacaaggtcaggagttccagaccagcctaaccaacatggtgaaaccccgtctctactaaaaaatacaaaaattagctgggcgtggtggcgggcacctgtagtcccagttactcgggaggctgaggcaggaaaatggcttgaacccaggaggcagaggttgcagtgagctgagattgcactactgcattccagcatgggtgacagagcaagactccatctcaaaaaaaaagaaaaaaaaatcagatttggtgtataaccatctttatcaacctttttttctccccctccctcctttatcaacattaaaaaaaaaaatacaagaaaatttgtcttcacattgtcttttcaatgctcgaatcttcactaacactgtgaaaagcacaacagttcttaaattcactaaaccagctactactcgcactaaatgaaaactaaatgcagaatgtttacatatttttaagtcttcatgtgttgtgaagcctttctctttcattatgagacagcgtactcctgagaacttagaaatgttaacgcataaagaaagatctttggtgaaccaccaggactttcatgatacattaatatcattctcccactatatgcatatgagcaaatttgtgttacagaaacatatataatagcaaaagagattatattttgattcagcagacttcaaaagtgctcctcaggtgattctgatgcatgcccaaagaattaatattacaaatgaatattttccactgacttcctttctaaatattaaatatttaacaagaaaccacatcctcaagtgcctacttacataacaggaataagatcaaaacagacaagatatctgccttcatgaaccttacaatcttggcttgaaacagccagataccaatcctgaagaaaaagaattagattcttacctcatatcttacatcaaaaaaaaaagccaagtaatagcaaacatttataagaggcttattagcaaatcacaaaaagcctcaagttaaaaaaaaataataataaaggattcacattatcttgggttcaggaaggccaaaagcaaaagatataaaagacattagtttttaaaaaagaaagattgatggataaaataaaaaactatcttccactgggcacgatggctcacacctgtaatcccagcactttgggaggccgaggcgggcagatcactagaggtcaggagttcgagaccagcctggccaacatggtaaaaccccatctctactaaaactacaaaaatcagccaggtgtggtggtgcgagcctgtaatcccagctacttgggaggctgaggcaggagaatggcttgaacccgggaggcggaggttgcagtgagcatagatggcaccactgcactccaacctgggtgatagaagaagactccatctcaaaaaaaaaaaaaaaaaaaaccacacacacaaaaacacaatcttctgcttatcaaaacagtaataacaaattaaaaaggcaaacgattaaataggaaaaccatttgcaaaacatgcactctaacaactcaatgtaaaataaaccaacagaaaaatggacaacatatacgaaaaaacaatttacaaaacaggaaaaataaccaataaacaaataaaaaaagttaagttttactaacaaataataagtgtaagttaaaaacaatcattcatcaaattaacaatctttttgttaaacaatagacatgtggtgtcagcaaggataaaaaagaagtggatacctttatttatttttattttttgagatgaagtctcactcttgtcccccaggctggagtgcaatggcacaatctcagctcactgcaaccaccgcctcccaggttcaagcgattctcttgcctcagcctcccgagtagctgggattacaggcgcctgccaccacgtccagataatttttgtatttttagtagagatggggtttcaccatgctgggcaggttggtctcgaactcctgacctctggtgatccgcccgcctcggcctcccaaagtgctgggattacaggcgtgagccaccgcgcccagccaagaagtgggtacctttatacactgctgtcaggagttaagaactggccctactcttttgcaggacaatctggaaatacccaccgtaccttaaaaatcaacctggtctacaattaattatactaaaagaaatctaccttaaggaaataagtaagaatgtatacaaaaaaatcaacctaaataatgtatgggccagctgcagtggctcacgcctataatcccagcatattgggaggccaaagcgggcagatcacctgaggtcaggagttcgagaccagcctggccaacatggtgaaacctcgtctccactaaaaatacaaaaattagctgaacttggtggcgtgcgcctgtagtcccagctactcgggaggctgaggcaggagaattgctgggaggtataggttgcagtgagccaagatcacaccactgcactccagcctgggcaacaaagtgagactccgtctcaaaaaaaaaaaaaaacaatgcatgtcacaacaccgtacttctgaacaaacaggtaacctaaatgtatgacaattgattaaataattttatttaatcaatgaactttatttatgcatatgtggaatactaagtagccactaacaatacagttgtaaacctattggcacaaaaagaagctaagcacgtatttaagcaaaagtaagttaaacagaatgtacaaagggggcacattaaaatattcatacgggctgactctggacacactgccttatgggttagccctgttccacaaggagcagcaaaaaaacaacaacaacaacaaaaaacccataaaattaaataaaattaaaattaaaataatacacatacaaatagggaagaatcaacatgaaaatgttaataacttttaaatggtaaactgtaggtaattttttctttcaagcttatttaactcttctataaatgatatacctaggcttaacatttaacaaaaaatctaacaaatgttagttctttttaaatccttacttctggaggtgggcagttgggagagaatggggagagggagatggaaggagaagtattagttagtagaagtagtcatggtttacactttaggggaaaaaaagcaggactagagtcggggtcctgggttaatttcaactcaggagttactaacctaggtcacttaatttttctgaacacccagtttctcaactataacatggaaatgggtcacactacaacacaacacgtcccattttaatgaatgagtttttaagacacttttctgctaaaaaacaaaattctatagttacaaattacatttgtggtaatgtattcagccatggaagatgacctttattcactatatttttaaatttcttttttttaatgcagcagaacatttcttataaaccccacagactactgtatgataaagatgattcacatgataaggtgggtcacaaaacacctagaagcttagctaatttctagcttacggcaaagaatttttccccatccaacttactattttgaaaaatttcaaatttacttaaaagttgaaggaacaatataatggacactcatttatccttcatctagattcaccagtagttaacattttaacatatttgctttctgtgtgtgtgtgtgtgtgtgtgtgtgtgtgtataacttcattttggctgaactatttgaaaataaattgtagatacatttactatcttttaaattactcttcattgcataaaactcaaagaaaatgtgtgggtacttatttatctggtatcagggaagaaagggcaattaggcataaaggttaataaacacagaaaaaagatttgatggcagtaaaaacattttaaacttcagtatgctttaaaaaaagaaaaactgaaacaaaaagacactgggaaaaatattagcgtatgttggtaaaaaggttaacactttactgttaagagtttttaaaattaatttattctttctatgacaaatatttattctgtatctactaagtgtcaggcacttcctaatctgcagaattaataataagcaaagcagagttgaaaaaggtaaacataggcccggcacagtggctcatgcctgtaatcccagcactttgggaggccgaggtgggcagatcacgaggtcaggagttcaagagaccagcctggccaacacggtgaaaccctgtctctactaaaaatacaaaaattagctgggcatggtggtgcgtccctgtaatcccagctactcgggaggctgaagcaggaaaattgcttgaaccaggacccgggaggcggagattgcagtgagccaagatcgcgccactgcactccagcctggggtacagagcgagactccatctcaaaaaaaaaaaaaaagaaaaaggtaaacatagcaataaaacaaggacatactacatgagcaaacatttcacaaaagatgggtaaataaaaataagtgcatggggaaagttcttaatagaactcgcattgtttgaaatgtcacaaaatatagctaaatattaaaacttatctttgtacagcatggcaactatagctaataatatgtattatatatttaaaaattgctacgagtggattttaaatgttcttaccaccaaaaaaaaactatgtgaggtgatgaatatgttaattagcttgatgtgtttcccaatgtatacatacatcaaaatatcacactgtataaatatcatcataaatataaatatcaccataaatatacacaatttttattccacaataaaactgggggagggtcgttatctccaagttacaggattacaggtaacttttttcctctttattttcccagttttctataagtatgtattacttacataaattaggaacaattttcttttgtatagaacttatatgcacaattcaaccttacctggatgtgttttctcccatatagcagttaataaactgctactaaatttaagggacttgtttaaaatttaattaagatttaacaaaactagtagtcttgagtacctctgaccacattttatagccagcaagccagtaaaaaaatgcttgagcattatttaatagaaattcttctttatgggagcagtcttcttggactgttttcacttaccgaaaaggcaaaagtgctcactttagcagtctggagcactcatctgtggtttctagttttgtttaacaaaatttttactttcccataccactaacctttagagactggtgtaactggactttctttgaggtgctatgcatgagtataactaaataaacattacaaacctacaactctacagggtaagagaacaaatatttaccttcttagcatctgcagaagccctcagcccttctggcagcgggtgcactaaaggcaaaaccgcagcactgacacgctgaaaatgagaatcagaaacctgttccagacgtggtcgcttcgattccagtgaatcatgatccactggggatgggcctggatgaaacggttcataactagttctcctttcttgaggcctaatacatacaaagaaaataaacacttgaaaatttgtaagtgatgtacaactccctggtaacatccctggttagactttgaaataacaaatgaaaaagtcatgcttacattcaaagtgaatccgtaccccttctgttcccacccccaaagaatatatacctcactatagtaccattaaacttctagtctaatttttaaaaaaggtttgaattagctgggcgtggcagtgggcgcctgtaatcccagctactcgggaggctgaggcaggagaattgcttgaacctgggaggtggaggttgcagtgagctgagatcatgccactgcactccagcctgggcaacaatgtgagactccgtcttaaaacaaaaaaaaaaggtttggggggaggattaaaaactaatctagaagtgaaagacaaaacagaacatttgcagaaagtttagttgctgaagaatatctataaactaatatttttaaatgttaaaatgccataataattaaatttgggataatataaaccagaagagccaccatttttcaaccaataataaaaacaagcaagaaataaaaatctcccagctattgctacaaagaaagagaaatgacttcacttatgaggtaccattcagtcttaaagacaagtctcttgaggagaaatccaacattgcttctaaaacatcatcctggccccaaaaacatgtattctgtctagcttccctaaatacatgacttgaagatcagaatctttcatttctttacaggatgtattgttgagtcctgctcgtgagtgctcattaagttgacttttcattttctaccaggtgtttacagaggtgatattgtatctcatggccaacctgtaaactaatgctttgcaaagcaatatttcattgaaaacagaattgctgggtttcatattgaggacagacaatgaaatgaatgctaaattctttttttgtttgtttatttcttttttgaggcccagactggagtgccccatctcggctcactgcaacctccacctcccggattcaagtgattctcctgcctcagcctccccggtagctgggattacaggcgcgagccaccatgccaggctaatttttgtagagatgaggtcttgctatattgcctaggctggtctcgaactcctgagctaagcaatccacctgcctcagcctcccaaagtgctgagattacaggtgtgagccaccgcacctggcctgaatgctaaattctgtaaaattattatacttcaaaattttaaatctcattcaacacatagaattccattatcttaaaattcagagtgacatcacaaaaaacttcaggaatgggaaacttcaggaacaagacaaagatgactgcattcaccatttatattcaatatggtattggaaattactttcagagcactaggaaagaaaaagaaataaaaggtatccaaatttaaaaagaaataagcatttttattcaagacaacatgattccatatgtggcaccctaaagaattggcaaaaaaaaaactattagagctaacaaataaatacatcgaagttggaggatacaaaatcaacacacaaaactcagttgtattctatacactagcattaaacaatccaaacatgaaacttaaaaaacaatacatttatgctgggtgcggtggctcacacctgtcatcccagcagtttgggaggccggggcgtgtggatcatctgaggtcaggagttcgagaccagcctgaccaacatggagaaaaacccatctctactaaaaaatacaaaattagtcagacatggtggtgctcgcctgcaatcccagctactcgggaggctgaggcggaagaatcgcttgaacccaggaggcagacgttgaggtgacccgagatcatgccattatactcctgcaggggcaacaagagcgaaactccatctcaaaaaaaaaaagcaatacatttataagagcacccaaaagaacatagctaggaataaatatgaccaaggaggcttatgactttaaacactgaaaaccacaaaacattgctcgaagaaataaaagacttaatacatagtaagaaatctcaaattcatatgttggaagataatgtcattaaatgacaatactacacaaagcaacctgtggattcaatgtaatctctatcaaatgccattggcttttttgcagaaatagaaaaactcatcagaaaattcatatggaatctcaaaggattacaaacagccaaacaatcttggaaaagaacaaagttggaaaactcacacttcaccttttaaagcttactacaaagctattataatcaaaagattcatcctccactaaggccagaggtaatctacccaagtaatgccttagctggacttctgccctcagttgccccctcagctagaacataacctacaaaagcataattttcaagtattacatttcatttccagcaactctgcctctgagatttatcaaagccagaaggtgaggcataccatacccagtactggagaagaaactaaggtaccaaggaacaggacaactcagaaaacaatgagtatggaatgctctttttctatctagaaatcagactacttcccatttcagcctgccaatcctttttagaagaacaaatctactcagccataaataaatatataatttaatgtataaaatctcagaaatttaaataaactacgaaaatctttgctaagtacaatttaatattaggagttctggtagaactaagcatgaaatctccaatttaaattaatgtatttgccttttaaaattaacaccagtagaatggtatactttgaaaacgatctggtagtttctcaaatagttaaataaaatagagttaccacatgacccagcaattccactcctaggtatctaactaacagaaaggaaaatatacgtacaaacaaaaacttgtacacgaatattcacagcagaattattcataattgtcaaaaagtaaaaatgatccaaacacccatcagctgataaaaatagataaataaactgtggtataaaaaaaaaaaaacctaacagcaaattttcacataaagaaatctttgtagggcaagatgccgtggctcacgcctgtaatcccaagactttgggaggccgagtaagtgcatcacttgaggtcaggagttcgagaccagcctgaccaacaaggtgaaagcccgtctctacaaaaaaatacaaatgttaggcgggcgtggtggtgcgcgcatgtagtcccagctactcgggaaactgaggcaggagaatcgcttgaacccaggcagaggttgcagtgagtcaagatcacgccactgcacaacacaacagtctgggtgacagagccagactcatttgtcttttaaaaaaaaaaaaactctgtaggcttgcagactttgtaaagttccccattttactgacttttgtcatctcgtaacaccatctttaaacatctttaaaacaaattaaaattacaaaacacatttaaataactatactttatcattcgaactttaaagaattttaaagcagtctgatttcttgctaaaagagaatattccatactcaatgtttttcttaattttcctgtgccctggttgccggatgtagtggctcacacgtttcccatcactttagggggccaaggcaggaggatcgcttgatgctgggagtttgagaccagtccaggcaatatagcaactctgtctctacaaaaataaaaaatttgtcaggcacaatgccatgcgcctgtaatctgagctactcagaagactgaggcaggaggatcacttgaacccaggagtttagagactttgtctcttttaaaaaaaaaaaaaaaaagatgggtttatggctaactaccaatcctcttaccatggcatccattctttgtttggctggattcggtcatcaagaaattcttaggccaggtgcggtggttcacacctgtaatcccagcactttgggaggtcaaggtgggtggatcacctgaggtcaggagttcgagaccagcctggccaacatggagaaaccccatctctactaaaaatacaaaaaaattagccaggtatgggggcacatgcccgtaatcccagctacttgggaggctgaggtaggagaatcacttgaacccaggaagcggaggttgcagtgagccgagatcgcatcattgcactccagcctgaacaacaagagcaaaactccatctcaaaaaaagaaaaaagaaaaaaaagaaattctttcaggttttttgttttgttttgctttgttttgtttgaaacagagtgtcactctgtctcccaggctagagtacagtggtgcgatctcgcctcactgccacctccacctcctgggttcaagagagcctcctgcctcagactccagagtagctgggattatagacgtgcgccaccactcccagttaatttttatatttttagtagagacagggtttcgccatgttggccaggctggtctcgaactcctgacctcaggtgatatgcatgcctcagcctcccaaagtgctgggactgcaggtgtgagccaccacgcccggcctctttcagttttagatgctataattgctcagtgctttcatgtctaagaaaatctgcctgttgtttttattgttaaactgtctggtataatattcttgaatatcaatttcttttactcagaactttgtagctactgcttcactattttctgtcactcaattctgctatgtagaagtttgtagcctgactcttccaccttgtggagcatttattttgtttcctgaattcctagttcttttacttatccttgaaatttaattcctcaaccatgatctgtcttggtatggatcattctttctgtataaattttcctggaacaagatatgttttatcaatctgtagaatctatcaattcttccttaactttatggggaatttctgtattatgaatattattactgttcctttaccaggttttccacctcaaaaacatgttcttatagtatactggatgatctttatttgtcctccctacaagttctttctaattgtcttaatctttgtccttttcttctgcactcactctaattatatcaagactttgttctaagacaaggtttaccttaagccacatctactttattccttttctttctaattttatatcttcagggcactcaaatgtctgaactacatttagcccatctggctgtcttatcattttgtttttgaatacttcattatttaagttcttttatagaagaaatatagaaatatagaacttatttatattattaagttcttttatagtgcatagcacttacgaggcatgctctttatgtttcttacacgtggcgattttatttttggcatactatgttgctttaattttcttttccaggaatatattcgcctcatttgtgccattccccaccctcctgctcaggtacattgtggcagcctttctctttggcgtgggatagtctgggtgggttctccttgattgttcccactttttctggcatgtagtcatcttctctgcaaatggaagaataggtatggctttctaaatactgttctatggcccgagggaacatgtaagtggggcaaaggaagaaaaatcttggttagggctgtaactgcctctgctaaggactctggccccctctaccagccagacatgtagaccactccagagggttctggctcatcactttacagaatggcacatcccaactgtcctttctgcagctgttgagaaaccaggatggcataatgggaattctcaagcaaaccattcaccaccaccaattgaaattttctccaatcaaagaatattcatgagaaatcctaggatttcactaacttactttcttcgatactgcttttttttaattttctttttaaaaaactcatgttccgccaggcacagtggctcacgcctgtaatcccagcattttgggaggctgaggcgggcggatcacctgaggtcaggagttcgagactagcctggccaacatggtgaaaccccacctctaccaaaaatataaaattagccagtcatggaggcaggcatctgtaatcccagctactctagaggctgaggcatgagaatcccttcaacccgggaggcagaggtgagccaagattgcgccactgcactccagtttgggcaaaaagagcaaaactctgtctcaaaaaaataaaataggccagttgtggtggctcatgcctgtaatcccagcactttgggaggctgaggcaggcaaatcccaaggtcaggagattgagaccatcctgactaacacagtgaaaccccatttctgctaaaaatacaaagaatcagccgggcatggtggcatgagcctgtagtcccagctactcgggaggctaaggcaggagaattgcttgaacccaggaggcagaggttgcagtgagccgagatcacgccactgcactccagcctgggcaacagagcaagactccgtctcaaaaaaaaaaaaaaaaaaaaaaagaatagaataaaataaaatgaaataaaataaaaactcatgttccttgactcataaaacaataatgctactttaacaatagaaaataggaggccaagtcattcaagatacttgtaattctttccgtgaatcccacttttctaagtttttgacaatagctgtatgtcttttcttatttataaaagggtaaatttttagcctgtttgaaaaatatgtttttgttcattttttagatattaggggacaagtaagctgaattctctctccaaacttaaccaagaaatgtattatataataattttaggctgggagtggtggctcacgcctataatcctagcactttgggaggccgatgcaggtggatcacctgaggtcaggagtttgagaccaggttggccaacacggtgagaccctgcttctactaaaactacaaaaaaagttattttttttttgtagtgcctgcagttccagctaatcggaggctgaggcagaagaatcgtttgaacatgagaggcagaggttgcagtgagtcaagatcatgtcactgcaccccagcctgtgcatcagagtgagactccacctcaaacaaaataatattatatttcaaatctttgatcaacttaaaacctaaacagtgagcacatttttgaaatgggaaatcaggtaccttataaaattgctgaaatcagaaaggaaatttataaaggtaattatatttcaaaataacttagaattcatataaataaaataaaaatgaaaacgaagaaattacaacagatgcctcagaaataaaaaggatcataaggaactatatgaaccattatatgtcaataaattggataacctagaggaaatggataaattcctagaaaaacacaacctaccaagattgagttaagcagaagtagaaagcctgaacaaacgaacaacaaatgaagaggctgaagaagtaatcaaaaacttctcaacaaagaaaactccagtatctgaaggcttcatggcagaattctactgaatagtcaaagaaaaatatataccaactcctcctaaactcttccaaaaaatagagctagagggactatttcccaacacattatatgagagaaacttaactcaaaggcatttaagttgatatctaagtcaaggacatcacaagaaaacaaaactagaggccaatctctctaatgaacactgatgcaaaaatcctcaataaaggccgggcgtggtggctcacgcctgtaatcccagcactttgggaggcccaggcgggcggatcacgaggtcaggagatcgagaccatcctggctaacacagtgaaaccgtgtctctactaaaagtacaaaaattagccgggcgtgaagccgggaggcagagcttgcagtgagccaagatcgtgccactgcactccagcctgggcaacagagcgagactctgtctcaaaaaaaaaaaaaaaaaaaaaacaaacctcaataaaatattaacaaactgaattcaacaacacatcacgaagattacaaaccactagcaagtgggacatatccctggcatgcaaggctggtttaacatacacaaatcaatcaatgggatatatcatattaagagaagtgaacggacatttctccaaagaaaacataaaaatggccaagagatatatgaaatggtgctcaatatcactaatcacaatggaaatgcaaattaaaactacaatgagatctcacctcacacctgtaaggatggctattctccaaaagacaacaaatgttggcgagggtatggagaaaagggaaccctagtattttgttggtgggaatgtagattgttatagccattatagaaaacagtatggaaggccccaaagaaattaaaaatacaactactatagacccagcaatccctcttctggttgtatactcaaaaggaatgaaatcaccacctcataaagatatctggggtgggctcagtggttcatgcttataatcctagcactttgggaggctgaggcagaaggatcgcttgaggccaggagttggagaccagcctggatatagtgagaccctatctctacaaaaaatacaaaaatcagccaggcacagtggcatgcacctgtggtgccagctacccgggaggctgcagtgggaggatcatttgagcctgggaggtccaggctgcagtgagccatgatcatgccactgtactccagcctgagtggcagagcaagaccctatctcaaaaaaaaagaataaaacaacaaccagatacctacactcccatattcatggcagcatcattcacaatagttcatatatagaaacaacctagatgcccactgacagatgaatggattaagaaaatgtgcaggccaggcacagtggctcactcctgtaatcccagcactttgggaggctgaggtgggcggattacttgaggtctggagttcaagaccagcctggccaacatggcgaaaccctgtctctactaaaaatacaaaaagtagctgggcatggtggcacacgcctgtagtcccagctactccagaggctgaggcaggagaactgcttgaacccaggaggtggaggttgcagtgaaccaaggttgtgccattgcactccagcttgggtgacagagtgagactctgtctaaaaaaaaaagaaagaaagaaaatgtgatgtgtgtgtgtatacatatatatgtatgtgtgtgtgtgtgtgtgtgtgtgtgtgtgtgtgtgtgtgtgtataaatattattcaactttaaaaaagaaaaaaatcctttcataccataacatggatggaccatgctgaaaccacgctgaaataagccaggcacaaaaataaaaatattgcatgatctcccctatatatggaatattaaaaaaaaaaaaagcactcaaatacacagggatagagaatgaaacagtggttcactggttggggatagagaaataaggagatggaggtcaaaggatacaaaatagcagatgtgtgggatgaacaagtctagagatctaatgtataacatgaggactaaagttaatacaattgtattatattagggatttttgctaaatgggtagattttagctattcgtcaccaaaacaaagtatgtgagatgacagatatgttcactggctaaactatgtgtatcccataacaccatgtaaacctcaaatatacataataaaatttattttaatatgtaaatgtaaaaatcattcttaacttgagggctctacaaaaacaggacagacaggatatggtcagtaccaactagccttagtttggcaacctctgtcctagataataaaaaaagtgaaaaacagcaaacaaataaaactaaacctctagtgctacaaaagaacaatttgaaatgatcatgtcaatactgaaaaaagagaatggcaaaagtatgggtaacaaacttttttttttccaaaccaagtggtttctaattctttacttttgtatcaaaggagaaactattttttagctgaaagatcaaaaaaaataattttagatatcagatcactgtgattgttggtctagaaattggaaggcactcagagaattaagcaaaattgcagctacaaaatttattccatttctacctgcttagatgaacaatattcatagtctataaaaaataaaaattggaatagtattcacatagaagcctgcctgtttccagtaattagtactcaaaaattacaataattgggggaagggaaaccagtcctttcttattaaaaggtatgttttcagtaagattttactttttgcttttaagaataatgtaataaaatgtatacatatatttatgcttttttgttcaatgatctactactactaattgtcataacttaatccagagtaaaacttttaaacactcagggcctaaaatcacagaaaacttaaataaatttattttattttacttatttattttttttgtttgagacggagtctcgctctgtcacccaggatggagtccagtggcacaatcttggctcactgcaagctccgcctcccgggttcatgccattctcctgcctcagcctccagagtagctgggactataggtgcccaccaccacgcccggctaatgttttgtatttttagtagatgaggtttcaccgtgttagccaggatggtctcaatctcctgacctcgtgatccgtccaccttggcctcccaaagtgctgggattacaggtgtgagccacagtgcccggcccaaaatttctatatgtatttgtagtagaaatatatgaaagtgatcagtaaaatgctattaagaataaacatattagcaaaaaatttttactggagaagaaaagaaataaaaattcaaggagaaaaaaaggacaatataaagtttcctactggtaaaaagaagagaagtaaaaacaaaaacaaaacacgtcatcttaactgatgcagaaaaagcattcaaaaagtccaaaatcttttcttgacttaaaaaactcaacagtttaggaaaagaaggaaagttccttaacataataaaggccatttgtgaaaattccacaactaacatcataatcaatagggaaatactgaaagattttccactaagataccatgaaaggtaaggatcggatccttttcccatctagtactatgttgattagaagcagtggcaaacacttctaatcaacatagtactagaagtactagcaagagcaatcaaacaaaaaaaaaaaaaaagaaaagaaaaaaaagaaaagaaataaaaggcatccagtcagaaaggaaaaagtaaaaatatctttatttgcagatgacacaatcctatgtataaaagttccccaagattctacacattaaaaaaaaaaactgttagaataaatgaatccagtaaagttgcaggatacaaaatcaacagcagttttatatacaagtaacaacctaactgaaaaagaaatcaaggaaacaatttatgacagagttctaaaagacatttaaataaatttacttggttaaataaatttaaccaaggaggtgaaagatctgtatattgaaaactataaaacactgattaaaaaactgaagacacaaataaatgaagagatatcctgtgctcatggatcaaaagaatgttgcaaaaatgtccacacaacccaaagaaatatacagtacagattcaacacaattcttattaaaatcccaatggggtttttcacagaaatagaaaaaacaaccctaaaattcacatggaagtataaaagacccccaatagcaaaatcaattctgaaaaagaaaaacaaagagacatcacacttcctgatttaaaattgtactaccaagttacagtaatcaaaacaatatggtattggcataaaaatagacacactgatcagtagaaaagaatagaaagcccagaaataaatctaaacatatggccgcctaacttttgacaagggaaccacagcaacacagtggggaaagggtagtctcttcaataatgctgggaaaactagatatccagatgcaaaggaatgaaattagacccttgttttacagcatatacaaaaatcaactcaaaatggataaaatacttaaatataagatcagaaactataaaagtcctgcaagagaacgtagggagaaaagctctgggacaccgaccttggcaatgattttttgcatatcaagaggtcaggccacaaaagcacaaatatataaatgggactacatcaaactaaaaagcttctgaaaacaacaaaatgagtcagcagcctgtagacacagaaaacatatttgtaaactatgcatctgctaaggaattaatatccagaatttataaagaactcataaaactcaatagcagaaaaacaaataacctgattttaaaatgggcagaagatctgaatagacatttctcaaaagaaaacgtaaaaatcaccaacaggtatatgaaaagatgttcagtatcattagtcatcagggaactgtatattaaaagcactatgagatattctcacacccattaggatgcctattaccaaaaaaagtcaaaagataacaaatattaatgagggcatgaagaaaagagaactcttgtacactgctggtggtaacgtaaattagtacaaccattatggaaaacagtatgaaagttcctaaagcaattaaaaatagaactaccacatgaccccacaatccttcttctggatatatacccaagggaaatgaaatcaccatcttgtaaaggtaaatgcactcccatgttattgcagctaattattcacaatagccaagatataaaaacaatctaagtgtttgtcaatgaatgaatcataaagaaactgtggtatatatacactatggaatattattcaaccctaaaaaaaaatgagatcttgccatccacaacatggataagcctgaaggacattatgctatgtgaaataaacctgacacagaaagtaaaatattgcatgatttcgcttatatgtggaatcttaaacaaaaaaaaaaaaaaaaaaaaggaactatacaaagagaacaaaacagtgctaacagtggttaccaggggcagggggtggaaagaaaatggggagacgaaagtcagaggatgtaaagtagcagacacatagaatgaaaaagtctagatttcttatgtacaacatgaggactacagataataatatagtgctgtatctgggattcatgataaatgagtagattttagtcggtccagccacaaaagcaaaaataaaaacaaaagcaaaaataaataactttgtgagatgatggatatgctaatttgcttcaccatagtgacctttttattatctatacgtatcccataacatcatgttgtatgccttaaatacacacaatttaaaaaaaaaaattctggcgaggtgcagtggctcatgcctatgatcccaacactttgagaggccaaagcgggcagatcacttgaggcccagaattcaagaccagcctggtcaacacggcaaaaccccatctctactaaaaacacaaaagttagctgggtgtggtgtgtatgcctgtaatcccagctatttaggaggctgaggcatgagaatcacttgaaccctggagacggaggttgcagtgagctgagatcatgccactgcactccagcctgggtgacaagagtgagactctttctcaaaaaaaaaaaaaaaaaaaaaaaaaagaattaactattttgggaggtaggggtgggtggatcacttgagctcaggagttcaagactagcctgggcaacatggcgaaatcctatctctacaaaaaatacaaaaaattagccaggactgggagactaaggtgggagaatcacttgagcccaggaggttgaggctgcaatgagccatgatcatgccactgcactccagcctgggcaacagagctagaaagatcctgtctccaaaaaacaagaaaaaacaaacaaaactttcagaatgagaatgaagtaaaagaaagcagagatggtaaggacactcaggaaaaagagaacccaccatgcatgtacaggacctacattatctgacagaatatttactatcagttgaggacaatgccactattatctccatttttataggagggaaaactaaagcttgaagagttgagatcagtgactggcaaccctagctgcaaatcagaattaccggaaaaacttcggcgataaaataaagcctgggcccaactccagagattgatttaagtgttttgtgatgaggcttgggcatcccaaggggttctaatgtgcagcccaagtctatagaacataaccaaggacacacaggtgaccaggtggtttactgcctttctactaaataatattaatgccaaactatggaaacaagttttaagagcttgttaactattgcaaccaaccaacaaaaaagaactcaaaatgcaaactataaatgaccagtcatggcttggttaataaaaagtaaaaaaataaaataatgacaaacttgtatacttcacaattataatcctagatagaaacataaaagaaacctcattacctgtcagaacctgggtgaaattctgaaagcaaggaaggtcgccttcgaagctgttgctgctgctgttgctgcaaaagctgtgatgcctgactcacttcaagatgagaggaacgataatcagggactgcgaactcctagtattaaaataatcataaatcaattattaaccaaaaactgaacaacatcatgaaatcaaagcaagtataaaggtagttatgggccactaagtatggaaagaaagagcaatgactatttcaatccttcattgatctaattcttccccttaaaataatcaacattttaactatatatcattaaaaaaatccaaaatgaaatttcaagtttaatctatattgactcattcctctaataacaaattacaataactcccaatctgtattactcacatcagtaaaatctcaaactcatgtgttcaatatgaaatcctaaaaagcattccaatactaaattcataatgagtaagctggaagaagggtaatggaagtctaatcaaatccatccacacttacaatgaagaaactgaagtacagagaatcaacctgctagttaagagtagtagtttttcccatcaaaactaggtgagtgtttttatgtttgtttttgtacctttcctttgttggttgttgtttttttttttttggcaaaaacttcttttccaaacaaatctattgtgctaactcaatcataaacagaaaaacacagaattactaaataagctaggaactccagtcctaggtatataccccaaagaattacaagtatataaaaccacacacaaaacctagtacacaatttttcatgggtgcattattcacaacagccaaaaaataaaaacaaccaaaatgtccatcaactaatgaacaaataaacaaaatgtagtataaccatacaactgaatatcattcagccttaaaaaaggagagatgctagaacacagacaaacatagaaaacattatactaagtttaaaaaaaaaaaaaaaggtcaggcacaaaaggccacatattatgattccatttatataaaatgtctataataagcaaatccaggctgggtgctatggctcacatctgtaatcccaacactttggggaggccaaggtgggcagactgcttgaccccacagattcaagactagtctgggcaacatagtgagacttcatctctacaaaaaataaatttaaaaattagccgggcattgtggcacgtcccggctactctgtaggctaaggtgggaggcttgcttgagcccaagagttagaggctgcagtgagctctgattgtgccactgcactccagcctgggtgacagagcaagacaccatctttaaaaaaaaaaaaaaaagaaagaaaaacgaaaaggcaacaaatccatagaaacagaaaatgaattggtggttgtcaaaagatggggagaagaggagaattgaaactgctattagttatggggtttcgttgcaggtgatggagatgtcctgaaatcaggtagtggtgatagctgcacaatataatgaatatattaaaagctgctatattatatactttaaaatggtaaattttgttatatgaattctgtgtcaacaaaaagttttaaaaatcataaacagataaaattatgctgtccaggataaaacagagggtagataagccattgagagcccttctctataagttatgagtaaaaaataactcatagtctaagaagaaatctcagatataaagttgaaaacataaaaaaaccatttaaaaaactttttcagcctggcacagtggctcatgcctgtaatcccagcactttgggaggccaaagcgggcagatcacaaggtcaggagtttgagaacagcctggccaacacagtgaaaccccatctccactaaaaacacaaaaaattagctgggcgtggtggcgtgctcctgtaatcccagctactcaggaggctgaggcaggagaatcacgtgaacccaggagggggagggtgcagtgagctgagatcgtaccattgcactctagtccaagcaaaagtgcaagactccatctcaaaaaaaaaaaatttttttttcaaaggcaccaaaacaaaaaggaatttacatccaaggaaataggtaaaacagtaaataaaagtaaaaaggacctagaaaatattaataatagcctcaaaaagaatcaaataggccaggtgctatggctcacacttgtaatcccagcactttgggaggccaaggcaggcggatcccttgaggtcaggatttcgagaccagcctggccaacatggtgaaaccccatctctactaaaaatacaaaaactagccaggcatggtggcaggcacatgtaatcccagctactccagaggctgaggcagtagaatcgcttgaacctgggaggcggagtttgcagtgagcctagacgaagccactgcactccagcctaggtgacagagcaagactctgtctcaaaaaaacaaaaaaaaatagtcagtcctcatcacaagggtttgttaaaaataaaaataaaaaaaaataacaacagaatcaaatagcaggccgggcatggtagctcacacctgtaatcttagcacattgggaggccaaggtgggagggttgcttgaggccaggagcttcacacaaacctggccaacttggcgaaaccccgtgtgtactaaaattacaaaaattagccaggcgtggtggcacatgtctgtggtcccagctactcaggaggctgaggcatgagaattgcttgcacccaggaggtggaggttgcaatgagccaagattgtgccactgtacttcagcctgggcaacagagtgagactctgtctcaaaaaataaaaaaaaaatttattaaagaatcaaagaaactaaaaactgaatcactgaaggtaaacaatagttgaacacacagaagtgaaaagtaaatgaaagctaagagagaactgaggaattctctcagtacccagtaaagcacaaagacatagaaaccacaggaaaaaagttaaaaatgggagctacagcaaaaagttccaacatcccatatccacaggcaagagacaggattctgaaaaataatagaacagcatttctctgaaattagaaaaaacatagtcttcagatttaaaagggcttaaggaaaaaactggatgtattttttaaattaatccatactggacacatgaaaatattaaaaaaacaagaataaagtgaaactttattataagtttgatgaaataaaaaagtttcctacaaagttagaaggatcataataaaagcaggcttctcattagcaacactgaatagaagcaaacagcaaataatagcatatttcaagttcagaggaaaataacgttgaagctacaaattgaataactaagtcatcatttggctgggcatgctgcttcatgcctataatcccagcactttaggagggcaaggcaggacagcttgaggccagggttttgatatcagcctgtgcaacacagtgagagcccatctctataaaaaatgtaaaaattagctgggcatggtggttcaaacctatagtcccagctactcatgaggctgaggtgagaggatcacttgagcccaggagctcaaggttacagtgagctatgactgcgtcactgcatttcagcctgggtgatagagtgaaaccttgtctctaaaaataaaatgaaataaaaaataaaccatcactgaagttttaaggctactaacttttgagaatttaagaactcaaataatataccaaccacagacgctctctgaaagaatttctttttttttttgaggagtctcgctctgttgcccaggctggagtgcagcggcacgatctaggctcactgcaagctccgcctcccgggttcacgccattctcctgcctcagcctcccaagcagctggaactacaggcgcccaacaccacacccagctattttttttttttttgtatttttagtagagacggagtttcaccgtgttagccaagatgatctcgatctcctgacctcatgatctgcccgcctcagcctcccaaagtgctgggattacaggcatgagctaccacgcccagccaacactccctgaaagaatttctaaaggacgtacccagcaagaaaaattaagagtaaggagtgaaataaaagtaacaacagtgtactgcagcttccaggtataagcaggtaacactgctcagaattaccttcccacagtcaacagctaaaaaattcaaagaaatgtagaaactattttcagaaactgaataataggcagcagagggcttgatcgctgagagaaatgaagcaaatgaggtaagccctacctaccatactctaggccctctgcctaaaggcaatttccaaactgcagccatgggaagggaacctaaatcatgtcccacaatcacagtcgttgaagaagcaaccgtacaaggtttggataagccataggaactgaacttccagaagttagtttcaaagagaaagatttcctaaactctgaatttgggatcccttaagcctatgcctgaattctagtctgtaaatgaataaggagaaatatcacaggctgggctaaaaataatttctgatgatagaacaattagaagcaactataaagcaaacaattccctgagctcactcagggcaagaactcattcaaatttcttccagcaagagtgaggaaatcccactgaatacacgggacattcaacagaaaccctaggagacaagcttagaagtgggggataaattagaataaagaccactctagacctgccctaacagtttaaaaacaagcctcaaaagtaacttaatttcctaccagaaggacttcatctctctttacaggaatataacaaaggccagcagtaaaaaaagtatgaaactcacaatgttcatattctcatcaaaaatgaaatccatctgcaataaaaatgtcactggataaaattaacaacaggttgaaaagtacagaagaaaggatcactgactatgataccatagcaaaatgaagctaatggatttaaaaaaaataaaataaaaacagggaaaaaaagtgaacagaggtccagtgaactgtggaataacatgcaacatgagtaattggagtcccagacagaaactaggggaaaaggagacaggaaaaaatatttgaaaaaaacaatggccccaaactgctcaaattttatgaaaattgtaaatccacagaatcaggaagcttggtgaatgccagggacaataatgtattcattcaaaaagcacaacagccaggcgtcgtgactcacacctgtattcccatctacttgggaggctgaggcaagaggatcccttgagcccaatagttctaggctacagctctgggctatgccaatcagatgtctacactaagttcagcatttatatgatgacgtcccagaagcaggaggactaccaggttgcctaaggagggatgaacccacccaggttacaaaaaaaaaacaaaaaaaatggagcaggtcacaactcctgtgctgaccagtagtgggaatgcacctatgaaaaccactgcactccagcctaggcaacatagcaaggcaccatcttcgtttaaaaaaaaaaaaaaaacccatacccaaattgctgaaaatcaatgataaagagaaaactcttaaaaagtaaccagaggagaccagacacagtggctcacacctgaaagccccacactttgggacgccgaggcaggcagatcacttgaggccaggagttcgagaccagcctggccaacatagcgaaaacttgtccctactaaaaatacaaaaaattagctggggccgggcacagtggctcacgcctgtaatcccagcgctttggaaggccgaggagggtggatcacctgaggtcaggagttcaagaccagcctgtccaacatggtgaaacgccatctctactaaaaatacaaaaattacctgggtgtggcggcacacgcctgtaattccagctactcgggaggctgagacaggagaattgcttgaacccaggaggcagaggatgcagtgagctcagatggcaccatagcactccagcctgggtgacagagcaaaactccatctcaaaaaaaaagtatatcggacttgataaaaataaaaaatgtacgctctccaaaggatgctgttaagaaaatgaggcaatacttcctttaataatttacatacaacaaacatatagatatatgttttctaagtaattttacttataataatcaaaaactggaataggtgattggataaacaaattgtggtatacccatactcaacaataaaaaggaatgaactaagacatgtcagacatggatagatcacagaagtattatgggaagcaaaagaggccatagacagaatagttcccatgaagctcagaacgtatacaatgtattatgatagaaagcagatcagtggtttcctaggagctgaggttagtaggaagtcggggaggaggactgacacgggtgggtgccaaggaggatggggtgccaaagaacgtcctagagtgttagaaatgttgttcatcttcattttcatgatggttgtatgagtttatgactttgtcaaaatttgttacaatgtacacatataatgagtgcattctaatatagatatatgtgtatatatataaactaaactgcaaagttaattttgttttttttaagatggggtttcactcttgttgcccaggctggagtgcaacggcgcaattttggctcactgcaacctctgcctcccaggttcaagcgattctccagcctcagcctcccgagtggctaggattacagatgcctgccacgatgcctggctacttttttcgtatttttagtagagatggggtttcaccatgttggccaggctggtctcaaactcctgacctcaagtgatccacccacctcagcctcccaaaatgctgggattacaggcatgagccaccgcgcccggcctgatttttttaaaaaaccagcagcaacaataatccagaaaattggtaatcggatgaataacactggggtagggggacaacacaagcaaaattcaacacccaatcatgacagaaattctcaaactaggaacagaaagcaacctcttcaaccaaaaaaggcatcaacaaaaacgtgcaactaacattacatgtaataatggtgaaagactaaatgcctccctacacaggaacaacgtaagaatgtccattctaactctgtaatcatgactgcacttcaaaggagtcctcaggaggaccctgtagtacattctgatgacaaatctgctttcttagtctctgagaggaccgttttatcccatcctttcctatttttctttaaacctcttacacccataaccttggtctactctgatatgattatttcacctcatactttatttttcacaaggtaaatcaatctcttacaaactcttcctatgataaagtcttccttcctaactaccatcccttccttcctacctactatacaaatcttcctaccatcaatttcttaaaaagagagaggtctttatcttggccctcacccaagacatgccaagttatctggccagcttaaaactcagccacaacttgggagtataaatataggtcttaccccagaaattctagagaattggtaagttttctatttatcatcaactcctatcatgaaaagcaaagacaagttcaactcctgaaatcagcataaagccacagtaagacagaaataattaattcccaatctttggttccttgtctttgtaaatagctcttgcaacttaaaaaaaaaaaagataaatttggtggtttctgtcccacatgtgtattaaataggaaaagtaaagaaaaacacaaaaaacatgtgcaatttgcatactatctgttccttacctgctggtggcgggtgttgggaaatgtatactggacagagtgaggaggataacgactttgttctgtgctgaatgctccttggttgggaggataacctgaacttgacattatcagtaaagaagtcctcaccagactgtgagatcaatgccaataaacaatcatgtttctaggaaaccacctaaacaggatgagaaaaaaacagaattagtaagaactaaaacaccaagtgtacttctaataaattataactatagctacataaataaaaccacaattaccagtaaaagcttcctctcatgtatttacttaataaaagttaccaaggtttgaaaacattaatgcatcatttctttttatacttaaaataggttaatatgtgacaaataatataattagttatataaagtaaaaacagtatataaaaacagcataagatctggcacataataactgctcagtaaatatctttctataaatgtctgagaaatataaagacaaaaatacatggttttaaatttgggagttgataagtcaattgcgaaaagaattcaagagtagttttaaggtaagcatttgtgcagagggaagtattgtctttattaaataattctgaagcaaggatgataaaatactaagttttgtaatcacagatggtaggtagatggacatttgttatattactctttgcatgcttctatggacctgaaatagcaaataaagaaaaagaaggccaggagcggtggctactcctgtaatcccagcactctgggaggctgaggtaggtggatcacttgaggtcagaagttcgagaccagcctggccaacatggtgaaacttcttttctactaaaaatacaaaaattagccgggcacggtgacatgcgtctgtaatcccagctacttgggaggctgaggcaggagaatcgcttgagcctggaaggcggaggttgcagtgagccgagatcacgccattgcacgccagccggggcaacagagcaagactccgtctcaaaaaaaaaaagaaagaaagaaagaaaaacaaagccatcttcattataaagtatattcctacttatccacaattctagactaatttgatttatctgtcttttcttgtgccaatgccacacttttcaaattactctagtattatgaggtttcatatccagcaggacaagtttcacctcattgtgctttgctgttgctgctactttcaccgccttcccagctattctagcacatttcctcttacacacaagcatcagagtcagcttgtcaggtcccagagaattctggatgagaacacataaatactgaatttacagactgactaatgggagaacaggtactgttatactcctgagtattcccatcctaaaacatgattatctatgtttatgtttcaggatagcacaaatgtttatgttatacataattaatatgtattttacatacatatgatagagaatattacatatgtataaaaatgtgtgccataatatataatttctatcttaattatatataaaactcccatgacaaaaattttatatacacatatacacacgtgcatgtgtgtgcatactctcttactttaagacaggagttctattattacctaattgggtggttttaaaaaatagaatttatatatgatgaaaattatataattgtatatataaaaatataacatatataattttatatatataaaatctccacacatttagtattttattagtaaagttttaattttgtttccatcatttcaagggatttgggaagagggcaaattcgaaaaataattcactgtgacaacttgatcaatttcccagtttttatcaatatattctttatccagttaggtttaaaaaataaaattttttagggaattgtcattcaatctaactttaaaataaaacttataggctggccacagtggctcacacctgtaatcccagcactttgggaagtcaagatcagaggatctcctaaggccaggcgttcaagaccagtctgggcaatgaagccagacctatgtctacaagaaaattaaaataataataataacaattagtcaggcggctgggcgtggtggctcatgcctgtagtcccagcactttgggaggccaaggcgggtggatcatgaggtcaggagatcgagaccatcctggctaacgcggtgaaaccctgtctctactaaaaatacaaaaaagtagcagggcgtggtggcgggtgcctgtagtcccagctactggggagactgaggcaggagaatggcgtgaacccgggaggcggagcttgccgtgagccaagatcgggccactgcatgccagcctgggcaacagagcaagactctgtctcaaaaaaaaaaaaaaaagaaaagaaaaaaaaaagaaaaaaataattagtcaggcatggcggtacacacccatggtcccagctacctgggaggctgaagcaggaggatcacttgagcccaggaggtcaagactgcagtgagccgtgattgtgccactgcactccagcctgggtgatacaatgaaactctgactcaaaaaataaaagaaaaacgtatagaaagaactttaaggccgggcgcggtggctcacgcactttaggaggccagcgcaggcagatcacgaggtcaggagttcaaggacagcctggccagcatggtgaaacctggtctctactaaagatacaaaaaattagccacgcatggtggcgcgtgcctgtaaacccagctgctcgggaggctgaggcaggagaatcacttgaagctgagaggcagaggttgcagtgagccaagatggcaccactgcactccagcctgggtgaggggtccagactccgtctccaaaaaaaaaaaaagaactttaaaaactatgtggtaccatgtaatatataaatattttaaataaatataccatcctcctcctgatgtcatgtttcctgctgttgtgaaagctgaccaggagaagagtcagaagactgaccagctgaccctcagcctgttttttccctgctcccttcctgaggcatggagatcagcaaatcttaaggattgtaaggttgagattacccaactaacactgatttgacaggtgagaaatctgaagatcagagaaagtcaataattcctctaatatcacaaaattgtggcaaaatgggaaaaactaatgttttctgcaatgctttgcagctttctcagcaagcagtgaactaggaggagctgagatgttcagtgagagcacacattaaaaccacctgaggagctttctcctcatccatacacctgcaactgctccaggtggaaggggaaaagccagcatgtggcatcgtgaggagggttgatctttttggaaataaatattatatgtaggacttaagaaaaagtaccgcagaatataaagcgaaaaatctcctcgcccttcttctccagctgctacccagttacactcccagaaggcaaccaaagttactagtttctagagtgtcctttagaaatatcctacacatacatacactcacactttttcccctatgtaaatggtggcatactagaaacacactgttctgtatcttgcttttattacttaatacatcttggttggccaggcgcggtggctcacacctgtaatcccagcactgtgggaggccaaggcgggcggatcacgaggtcaggagatcgagatcatcctggctaacacggtgaaaccccatctctactaaaaatacaaaaaaattagccaagcatggtggcgggcgcctgtagttccagctactcaggaggctgaggcgggagaatggcatgaacccaggaggcagagcttgcagtgagccgagattgcgccactaccctctagcctgggcaacagagtgagactccgtctcaaaaaaaaaaaaaaaaaaaaacatcttggcaattattctcatcaatttatggttctttctattgctaaacagtatttctctatatgggccgggtgcggtggctcacacctgtaatcccagcactttgggaggctgaggcgggtggatcacctgaggttgagagttcgagaccagcctgaccaacatggtgaaaccccgtctctactgaaaatataaaaattagccaggcgtggtggcacatgcctgtaatcccagctactcgagaggctgaggcaggagaatcgcttgaacccaagaggcagaggttgcggtgagccgagatcgtgccattgcactccagcctgggcaacaagagtgaaactctgtcaaaaaaaaaaaaaaaagagtatttcactatatgaacattcatgcattttgtaaaagttttccaactaattctgatctgctgtcctaaaacatgctttaagttatctatctctgcactctcctcccaactcagatatcccaaataaataaagctataaatggaatgaagaggcaaaaaaaaagattttaacccagggtcatccaatttttttctaacagtggcctaaatgattagaaacccatgaggtacaattttttaatgcacattgtttaactttcagctatggtgagtcctgagttcaacaattacactcaatgtcactcaaagtcacaagttaagtgacttgtccattttttccctcatctcagtaatccttccttgtccgttttgtggtatgactttagtgaagtttaactttattatctcaaaaaaaaaaaaagtcagttttctttaaaagtactatccgcccaatacagaaggaaaaaaaaaaaaacacacacacacacacacacacacacactagcaaaatcaggaaattagcccctactagcatacaaatttacaggtcaaagcaagcccttcctgtcctcgcatgaactgcagcctggagaccacgacaacctccttcctcaaaacttatccatgagatacacggcaacagtgctcagattttgttttttaaccagaatgttttcctcaaaagtcttaaatgaaagctaaatgtacaaaagatacaatggagaaacattccgatctagtaagaatgggagacctaggattcatcttttcagtctccccctgccctttcccatccttccctccacccttcactctagtcctggctcactaagatacctcggcagaatactttacatttgaaacccactgaaataaaagaatctagtttaaagttcagactgaaggggaagggagcaccttaagtggcagtatcaaattataatttcagttcttagcaccaaaactcattaactcagggtagttacatggttgactcatgaactgaaaaaattctacgaattgtttaagaaatctgatcgagattttataagcaacttcctcatctcttaaatatcaacatataatgttttaggatgggaataatatagtaataattatatgtcactgtcataaaagacaacagcacttctaactgaattatacagataaacccagaactagcctcttatatattgcaaacaggtaatacaatattgcaaaatgaaattgatctatttaagttcctttttaaatcctctcatattaaataaacgcacacatatttactcaacaggaaaatcttgcaacaacaaaatttcaaatactatcctgccaaaaaaaaaagcaatttttcctctcagcaggaactcctggcttttggcccacaatttttgcataaccaaaatgtgttatgcaaaggtgttcaaggtggcctaagctatcttggaaaaaaagctaaaaatggccaggcacagtggctcacacctgtaatcccagcactttgggaagccaaggccggcggatcacaaggtcaggagatcaagaccatcctggccaacgtggtaaaactccatctctactaaaacacacccacaaaaaaaaaaattagccggacatggtggtgcacacctatagtcccagctactcgagaggctgaggcaggggaatcgcttgaatctgggaagcggaggttgtagtgagctggcatcgtgccactgcactccagcttgacaacagagcgagactccatctcaaaaaaaaaaaaaaaaaaaaaaaaaagctaaaaatatacttcactgtggcaggactgcagatgccacttcagatgagcaagaatgaatccaccaagcgtcacaatagaggtgaagcctacatttcaccaaagcagaaaaaggatcccacaaaatatgtaatttttacgtgataaaataataaaacctactgatacaaaagtatggggtagggcaatgcctttatgacattcaaatgctaaaatattagttattaaactgaggaaaattaggtcacaccagttcccacaaagctgtccagctctacaccaattctaaaagtatgttaggcaagacaaagctaagaaggaccaccaccctgggcatcccaacacccaaaatcctccaacctggggataatttaaagaaagccgacctcctaaacttattacagagcccagcatgcaggagaggaaagactagaaattatctaagtgaattctgtaatttgtacaagaccagagtggtgctatactgtaataaattttctcttgtaaaataaactaaagcattcttccctttggggggaaaaaaaagctactgcttctcagccttttggttaagatccaatctgggagaatgccattaacaaggtattttatttgcagcctcttttgacatcatgacatcttacttaaagacagagaaacaaatagaagctaaagaaaaagctttttagttaacctatcctacctcttataaagtatgatattgaaagaaaaattttaataaggatataattatttgataaatctatgggtacacatactcaataagtaattctggccaggcacagtggctcacgcctgtaatcccagcactttgggaggccgaggcaagtggatcactagaagccaagagtttgagaccagcctggccaaaaaaacaaaaccccgtctacactaaaaatacaaaaactaaccgggcatggtgacacatgtctgtaatcccagctactcaggaggctgagcaagagaatcacttgaactcaggaggcagaggttgcagtgagacaagatcatgccactgcactccagcctgagcaagagaacaagactctatctcaaaaaataataataaatacataattcttaaatgaaagaaaaatgatgctattttacctctacaaaaagtgctgtcccaagacagcagtacaatgtaacaatatccaactgaaaactctgtggtatgtcgacactacattgaactaattctctgaactgaacaacactcactcactcactcaacttataagaacaaacatatttcaaagccagccaagcgcggtggctcacgtctgtaatcccagcactttgggaggcagaggcaggtggatcacttgaggtcaggagttcaaggccagtctggccaacctggcaaaacctcgtctctactaaaaatacaaaaaatacggctgggcgcggtggctcacgcctgtcattccagcactttgggaggctgaggcaggaggatcatgaggtcaagagttcaagaccagcctgaccaacatgtgaaaccccatctctaccaaaaatacaaaaattagcggggcgtagtggcgcacgcctgtaatcccagctacttgggaggctggggcaggagaatcgcttgaacccgggaggcagaggctgcagtgagcagagattgcaccactgcgttccagcctgggcaaaagggcgagactccatctcaaaaaaaaaaaaaaaaaaatacaaaaaattagccaggcgtggtggtgcgcacctgtaatcccagctactcaggaggctgagacacgagaatcacttgaacctgggaggcagaggttgcagtgagccgagatcgcacccctgcactccaggctggacgacagagcaagacttcatctcaaaaaaaaaaaaaaagaacaaatatacttcacaaccaaagtggatgactacatgccaattccctccttgattaacacaaaagaagaacaaagaaattgagataagaacaattttaatgtagatatttggcctgaattaatagatataacaatgtctaagtggatattactaaaagagttaccatttactgagctctagatatatactagccagtgtactaagacttggtgtgtgcgtgagctcacctaaaagtctggttccactattatctctaaggctgtaggaaagctacataacttcctcaagctatgtttttctaactcagagacagataccttaaagatcatctgctgctgcctcccctttgacccactaacagagactacaggttaatcaagggttatgaacagactctgttttttgctgcacccctctcagcacccccgagctccataaatcttaaagtcaaatgctcttagcctactttattttggtacacaccttagaaacaaacagaactatcaaacacctgtgaaggtaaagatcagctctgttctgctctacatggcctctgcagcagctagcagtacttagctctcagtaacacccactccaacagcaagttgtttagctgttccttacacacacacacacacacacacacacacacactctgaagcttcccaggcctctccatctaactaccaccatccttacctcttgctgcaaaaaaactcctaactgggcttcccacttcaatactttctcaactcaaaaagccaagtgttctttttaaaccttaaatcagaacatgtcactctcctgcttcagattccccaaggatttcctacgcaccgcaaataaagtctcaagtacttacgatgacccaaggccctacttgatttggcctgcttactttccagattgctcactaggccccagcaacatgagtttcctttcagtttcttcaggagcccttctctgccaggtccttcctaactgggtctttgtcctttactctctgccaggaaagctgttcctggctcattcaggtggctagctcctcctcaaacttaaggtctcagttcaaatgtcatctcagaagagtctttctaaccacgctacatataaggtaagctcccacaagttactctcaatcacatcaccctttttgttcctttataggtttatcataatctgaaatggattacgtacttcattttatttaagtatattctgtcttccctcactagaataaaaactacctgtttgattctctacaatatttgttgaataaaataaacaaacaaactcccattcatgggtctaatttttttaaaagaaataagaaatatacgaatatacgagacttatctgtacaggacttatttgaagcaaagtgtgaaaatctattgagggacataaaaatctatttgaacacaggacagaaagtatataaagatgtcaatttccccaaacttcacctacaatttcagtattcccaatcaatattcagcattcaataaaaatctctatgatttctttttgaatgtcacagaatgattctaaagttcatctagaagaacacatagaccagaattgtcaaagtctgaaaaaaagagtaatgaacaggtaactaaccccatctgtattaaaattataaaatgatagtaatttaaagtatatggtaatcaaagagatcaaaataaaataataagagatcaaaataaaataatacacaagagatcaaaataaaataacaagaccaatcagaaatagtcccaaacacatttagtaaatgacaaaagctgcaattctaatagtggggcaaaaaacagattattcactaaatggtgctgacacaactagctagttagggtagaattcacacacaattttatcccccaaaatatgtctcacttcttataccagaaataaattccagatggatcaaagaattagaagttttaaaaagagaaggaaaaggagaaaaagaaaccactgaagtattaaattacaacctggggactcctttgttttaaaaatacaaaaaggcatgcagttaaaaagtcttcctctcactcattcttcttactatgacaaccaatgtttccaagtatcatatatcctgcgatatacaagcaaacatgtatacattgtttttcatctttaaagcaaagacacatagaggcatataatgttcctcgctttgtttttctagtttagtagataggtgaatattttacattttggagtaaggaaagtcttaagtagagcacaaaacacaaaagtcacataaatagactaataagagtcacagctaacatttattatttacttactttgtgccagccactatgcctaatgctatttacattatctccattttacaaataaggaaattaaggtgtacagagattaaataatgtgcccaaggtcccacagcagcatggtgctgggtttggatatatctgactacataacattacaaaagaatagctagggggatatgtgcacacacatgaataaagtgagtgaggccaggcgcgttggctcacgcctgtgatcccaacgctttgggaggcccaggcgggtggatcacctgaagtcgggagtttcagaccagcctgaccaacaaggagaaaccccatctgtagtaaaaatacaaaattagccaggcatggtggtgcaggcctgtaatcccagctactcaggaggctaaggcaggagaatcacttgaacccaggaggcagagattgaggtgagctgaaatcctgccattgcaatccagcctgtgcaacaagagcaaaactctgtctcacaaaaaaaaaaaagaaagaaaaaagtgagtatgtagagaactttttaacctgttaaaacgcaataaccccatcaggaaataaccaaagaacaaaagtaggcaatttataaaagacacatggccgggctcagtgatgcatgcctgtaatcccagcacttcgggaggccgaggtgggtggatcacgtgaggtcaggagttcgagaccagcctgactaacatggtgaaaccccatctctactaaatatataaattagccaggcgtggtggcagacgcctgtaatcccagctacttggaaggctgaggcaggggaatcgcttgaacctgggaggcggaggttgcagtgagctgagattgtgccactgcactccagcctgggcaacaagagcgaggctctgtctaaaagaaaagaaaagaaaagaagaaaaaaaaaaaaggttgggcgcagtggctcatgcctgtaatcccagcactttgggaggccaaggtgggtggatcacctgaggtcgagagttcgagaccagcctggccaacacagagaaaccctgtctctactaaaaatacaaaattagctgggagtggtggtgcatgcctgtaatcccagctactagggaggctgaggcaggagaatcgcttgaacccaggaggcagaggttgtggtgagctgagatcaagccattgcactctagcctgggcaacaagagcgatactccgtctcaaaaaaaaaaaaaaaagaaagaaagaaatacaactctccccatagtaaaaaatgtttagcctcaatcttgatggataaaaggccaatcagaatcacattttttcagttcctaaattgtcaaaatgttttaaactgtaatatctagtattggccagagtatggggcatacctgaatactactggtagctttacaaattggtacaacaatcttttggaaggaaaatgtataaatatctatccatatctacattattcacatcttttgattcagcaactccacttctaggaatctatcctacaaagctgtttgtacaagtacacaaaatgcatatacatatgtacatgtgcataaatattcacacacacacacacaattgtttacagctttgtttttctggccaaaaaaaaaaaaaatctagtgaccgtaagttgattaagcaaattacagtattttcttttcttttttgaaacggagtctcactctgtcgcccaggctggagtccagtggcatgatctcagctcactgcaacctccacctcccagtttcaagtgattctcctgcctcagcctcccgagtagctgggattacaggcacatgccaccatggctggctaatttttgtatttttagtagagatagggtttcaccatgttggccaggctggtcttgaagtcctgacctccggtgatctacctgcctcggcctcccaaagtactgggataacaggcatgagtcaccatgcctggcaaattatggtatcttcatgtactagaaatgggatattaagttgctgttaatgattgatagaggtaactgaaataaatagacaaacttggaacagtagtatataaaagaatagtacattatgatcccataatatagaaaattagacaaacacagaaaagaaaactggaagaatatgcaacaaactcagtagattacatccaagaagtggttctttcaatttcggtatatatataaaataatgtattacttataattagtgaaagataagattttaaaatagcatatcctccttcatgcattataatgattttgtgtgaatataaagtaacttcttcctcccccccaacagaatgtatatactcttacatcaggtatatttacgttctgcatattttaggttataactcctagatagcacaagttttgatttcattccaaatacctccaaatacataaaagttattgtaattaaaaatgaatttaaaaatcttaaaagtaacgcaaagttaaacatctttgaacagaaactcaaagtcatgatgatgactacttaaaacaaacattttcaaaattacataaatctctatgttattgccaggggaaatgaattgcctaaaacaaattactctgaatgtgaactgtgtatgacagtgataatggcaagaagaatgtctgtcagttcaacaaagtatggggtaaaggggcaatctataagcataaaggtgactctcatcataaatctaagagtcaaaatttcctagaaaaatgtaatcttggcggggcgcagtggctcacgcctgtaatcccagcactttgggaggccgaggcaggcggatcacgaggtcaggagatcgagaccatcctggctaacacagtgaaaccccatctctactaaaaatacaaaaaattagccaggcgtggtggcagacgcctgtagtcccagctactctggaggctgaggcaggagaatggtgtgaacctgggaggtggagcttgcaatgagccgagaccgcgccactgcactccagcctgggtgagagcgagactccatctccaaaaaaaaaaaaaaaagaaaagaaaagaaaagaaaaatgtaacctcaatatatttggttttgatatcagcttatttgtgtataacaaagaataaaaacagccaaacagcccaaattttgttcctcgagtacactgtaatgggggaaagaaatccaaataagttaggattcttgacttttcctttactcctgactaatctacttaattttttatataaaactagtcgatattattctttcaaagggagtcctgaattctattataatcctatcaaccaaccgttccatatttctttcttttttttttttttttttttttttgagacggagtctcgctctgtcgctaggctggaatgtagtggcgcaatctcggttcactgcaacctctgcctcccaggttcaagcgattctcctgcctcagcctcctgagtagctgggactacaggcgcgtgccaccatgcccagctatttttttttttttttttttttttttgtatttttagtagagatggggtttcaccacgttggccagaatggtctcgatctcttgacctcgtgatccacctgccttggcctcccaaagtgctgggattacaggcgtgagccaccatgcctggccaaccgttctgtatttctaactcacagttttttcctaggattgaaactactccaaaattccctgcatataaaaattaaaacattattgcattctaatattatctagaaccatgagtgctgtctaggatgaaccaatcccatgtttactttctctttctccccaaaattccaataaacagaattttttttttcttttttaaagaaatgcttttaactgggctcagtggcccgcacctataatcccagcacttcaggaggccaaggtgggaggatcacttgagcccagcaatttgaggtcagcctgagcaacataatgagaccctgtttctacaaaataaaaaaattgaccaggtgtggtggcacacacctgtagtcccagctactcagaagaaccgcgtgagcccaggactcggaggctgcattgaactatgatcacaccactacactccagcctgaagcctccagagacagaccctctgtaaaaaagaaaaaaaaaagaaatattttgataatttactaattacagctatgttagtcactgacattggtgaaatttctacatgttttttaatttccaaaaactattcagcatcaaactgccatatgtgtatcagagatcttctacagcaaccacactaactctagctgctaagctcatttttatgagctaggcacagggtgttattctgggagtgggaaaagaagaaaaaattttttaaaaactcagatacagacatgcctacaaagggcttacggtctagaggcaaaggatcaagagttcccagaataaaaaatatacattttggagaagagggaataggagagacacttcctggatgatgtaatatgtgatcaaacccttgaaaaataggataaatttagatgtagtagagtttggaagagtaagggaggaaaggagtattccagaaacaagcatagtaacaagaaaaaaaaacaaaaaattcttcttaatgcaacacaaaatagcccaagtagaataaagaaatatgccatgcttcagtatttatgtaaagattatcagcttaataagaatatgccttttcctttataataaattttataggccaggcatggtagctcatgcctgtaatcccagcactttgggaggccatggtgggaggattacttgagcccagaattcaagaccaggctgggcaaaacaatcagaccccatctctatttttaaaaaattaaaataaaataaattttatagcatgaatacatacagaaaatgaatattacaaataagcttttggatgtaaaaaaaaaaaaaaaccataaagaatacactcggccaagtgcgatggctcacgcctgtaatcccaacactttgggaggccaaggcgggcagatcacttgaggtcaggagttcaagatcagcctggccaacatggcgaaactctttctctactaaaaacacaaaaattagcggggcatggtggcatatgcctgtaatcccagctacttgggaggctgagaacgagaatcacttgaacctgagaagtggaggttgcagtgagctgagattgtgccactgtactccagcctgggcaatagagtgagactctgtcaaaaaaaaaaatgttcatgtttgtgctatttatctaagcttttatattaatataacaattgaaatccttcatacttaaaaaaaaaatccagaagtctgagagtaggcaaaacaagcaacagctaattttataaaataatttaacctatttgtaggccaggtgtggtggctcacgcctgtaatcccagcactttgggaggctgaggcgggaggatcacctgaggtcaggagttcgagatcagcctgaccaatatggagaaaccctgtctctactaaaaaatacaaaattagcagggcgtggtggtgcatgcctgtaatcccagctacttgggaggctgacgcaggagaattgcttgaacccaggaggcagaggttatggtgacctgagacagcgccattgcactccagcctgggcaacaagagtgaaacgctgcctcaaaaataatagtaataataataatttaaactatttatttgggcctcaggggtatttaaaccactggcataataaaatttccatcactattaatacttaaattccatgaagtgtcactggacccagataacctcaaagacatttttgtttaagaagctattcatcaaagcagattaaaaattaagcaaactaaataattcctggtgatcactgtaacactgacatagatcagtatcaattttttcaaactatattttcattgccaaaatttaatattaagaagtatcttaaattcaatacctaagctaaatatccaaagtaatctctcatttcctattcactccaatttttttttttttttcttgaggcagagtctcactcagtcacccaggctggagtgcagtggcgcaatctcggcttactgcaagctccgcctcccgggttcacgccattctcctgcctcagcctcccgagtagctggcactacaggtgcgtgccatcatgcccggctaattttttgtatttttttagtagagacagggtttcatcatgttggccaggatggtctcgatctcctgacctcatgatccgcccacctcggcctcccaaagtgctgagattacaggtgtgagccaccgcgcctggccgatttttaagtgtcaatcatcaaatcgattcatcccatggatgatacagtgtaacacagtgaacactataatagatacgaaaagacttagattctgctattgcccaactttagcaacttaggcaggtaaatcacttcacttctccgaccttcagtgttatcgaaagtaaaacaagactagataatctgactctacattctataaattagctatttttattttatttttatttatttttttttttgagagacagtcttgctctgtcacccagtctgaagtgagtgcactggcatgatcatggctcactgcaacctcaacctcccaggctcagcttcccaagtagctgggaccacaagcacactctgctaatttttcaatttttttgtagagatgggactcgctctgttgtgcaggttggtctcaaactcctggcctcaagtggtcctatcacctcagcctcccaaagtactaggattataggcatgagccactgtgccctgccattaacattttattttaaccaattttgttgtttttgagatcgctgttaaataaaagtaacagcaggacatacggaagaagcaaactgtctgaagaactccataggaacattcgcagtgtttcatacagtctcagactttcaaatgcaaagaaaaaaaaaataggttgtatctgaagactattctagtaatattttgaccacacaagctactggggtaggaaaaaaatggtagaagaacagtataagtgttcaaggaaaaatgccaccacaagaaaaccaaaataaaaaacagatgctccacatacggttattactacattacagaagcttttcatagttttccagtgctcttaaaaagtgctaatagaaaaagaaacaaaatgttttcttaaccatttacatgtatacatgtattttttgcatcctcaaacctgaaaaggaccaaatataagataatctatagggccgggcacagtggctcacacctgtaatcccagcactttgggaggccaaggcgggtagatcatgaggtcaggagttcaagaccagcctgaccaacacgtctctactaaaaatacaaaaattagccaggcatggtggcgcatgcctgtaatcccagctactcaggaggctgaggcaggagaatcacttgaacctgggaagctgaagttgcagtgagcctgagatcacgccactgccctccagcctgggtgacaagagcgagaccctgtctcaaaggaaaaaaaaagaaaaaaaaaagataatctatagactgagttatttgtgaatataactgatctgctcgactatattttataactttctagtatttagtagtgtgccagaacataaaaagcacctcatactggttgaatataagtgagtaaacaaaaatatatgaatctctaatctacaaataagactatacacaataaattctgatcaatctttactagttgttttatatcatagtctagtaaaatccagtatcttaagtaaaagaacagatggaactaaatatgcaagagttccatcattcccaggcatcaagaagaatttgaaattacaactaagatagatcacagaatacaattaaaaccaaataaccaaaacatattttttaaaaaacaaacagcctgacactcacctacatcaacccccagtctatccaaaggcctttgccttctacagcagataacaaaggtaagaaaagaaaatttcaccaattcataacacaattttttttaatgcttttaaggccgggtgcagtggctcacccctatcatcctagcactttgggaggctgagacaggcagatcgcttgagcccaggagctcgagaccagcctagacaacatggtcaaaccctttctctacaaacaaaaaaaaaaattaaccaggcgtggtggcctgtgcctgtagtcccagcgacttgggaggctgaggtggaaggatcacctgagtccagaggtcaaggctgcagcgagccactgtatttcagcctgggcaaaagagaccctgtctccaaaaaaaaaaaaaaaaagctttaaaaaagttattaactaatctaatctttcctataagttaatttccatcatttcattcttttttgattaagaggataggcaaaacacaaattttactgttttttaaatccaacaagtattcaattaaaaataagccaggcacggtggctcacgcctgtaatcccagcactttgggaggccaaggcaggcggatcacgaggtcaggagattgagaccatcctggctaacacggtgaaaccccgtctctactcaaagtacaaaaaaattagccaggcatggtggcacgcgcctgtagtcccagctactcgggaggctgaggcagaagaattgcttgaacccggaggcggaggttgcaatgagctgagattgcgccactgcactccagcctgggtgacagagcaagactgtctcaaaaaaaaaaaaaaaaaaaagataaaatcagcgaagggcctatcctgctctcaagagataaaataggtacataaatacctacaagatagaaagtgtaaatgccgcgagagatgtgcagaaaaagcattacaggagcccagagggagctgttaccacctcacagaaatataaccccttcaatctgtttaaaacaattttataactattaactccctttaggctcacaacagccaaccctaggagagtagatgtttacctaatattcaagatgaggaaactgaagcacagaaaggttgatcaagttccaaaatcacatagttagagcaagaatcaagatactttgtattatattttctccgggggagtagttcaacatatggcaagccttttgtaaaaggaaagagtattttagtattgtaagtaatcagttcctactgtgagcattttatacatagctatatccatatatacaattaatcttgatttccattaacaggtgtgcttaaagcaaggccaagcaactgggtactataaatattaaaacaaataaataaacttccaccggatgttaacagaaaaagaaaaaaagatacaagatttctctctccagtaacttgcggttacttcttctgtaattgttacccttgtctaaataacattctaaaattggtctgctcctgagcccgggcaagtacaagttggttcatccaataaatatcttcatgaaaaggtacatcaaaacattttaaaaagctattaaaaattaaacgatgccatcaactcttcagttatccacaggacaatcacatgtgacccagcatcagcagctattgatcaagatatattgaacgaatgaatgaatctttgtaggcatttttaaatcccgggcctgttgctccttgcacagtgccatgttcagccttccatcactgcctcaccagggtgcacacaaggaatgtaaatttcaatataattaggatataattagagaagcaaatctgatgcaggtttacatactaatcccaaagattagaattacctatactactactctccaaggttaactctgtggaagaggcaccgcagcatgcaacatcacataaagaaaactgacacttcctgagcaaatagttttcgtccatatcacttattcccatccattcctttaatacatgactattcctgatccagttaatttgaagaattcagtctcctctccataaaggctgatttcacaactacagtttctcaaattcctctctccccaaaaaggggtgcacttacggacttcgcttaagaaaacaccaacaataaacggcagaaggtatagtgttcggatctttgccatctccaccagtacccagccttcgccattacaccctgaagcggtctgttagaaaggtgaactaatttactctgcacgcacttgtccatggctgtcaacctccgcagccccttctacacttccaagtcggccaccaactccgcctcagtgagcccaggcccgccacctgcgccggccccacccggggcaccggctgcccgctctccctcgcaggccctgtaggctccgcacgcccctccgcacaggacacctcggggccagccccggcccggccacagcccattcttcctccaaactccataagcctccgctagcccagcccgagctccccgccgcgcccggctctctcctgggctgccgagtggaagaggccaggcggccaggacgggtcccgacctgcccaggcctgcgacaccccccgcccggcggagaaaccgtcccagcggctgctgccccgggagccctcggaagcccccggactagcaggagcccggaggccggggttgcaggcgccagggcctactcaccgggagctggctaagcgtgggagccgacgtgcgccccggcctgaggagtgggacgcggccacggcgcgcggccctacaccgggacctcgttcggcgcggcgagtcggacgctcactccagccgccgccgccgccgcggctgctgcttcgccaccttggccgccatcttgactcaacccctctccctccccccagcccgcggagccgcggctaaggcggctccagcgccggctcctcctccttccggagagttgggagaccaactccctccgctggccgggcgcctctcctacctcggcggagcttcccgggtcgcgctgcgcccggtctcttcatgtctcctctaggcctggcagcggcggtcctctcggacggatacggggccgagcagcgcccagccggatccagcgctgctgccatcgtgccctgggcttgtgcgccccccgcctgcccgtctgttccgcgcgcccgaggccttcctcaggcgtgggaaaaggaaaaactccaggccgtggaagggaccctgcaaacccctccgcggcgtggtggggcggcggcggcctcctctggccggagctgcgtacagggaagccggtcccctcgtggctgggagctggaggggtgcatttcgacctgcccaagatactttctagggctctggctggaattcgcaccaagccctcactgaaatgctgggcgaggccgatttgtccacgatgttgctccttaaccttaagttacttgcaagaggagcctgtggccctcgcgactgttaagtgcacgctcagcctcaccctgctggggaaacgacggttcctcgtaaccgcacgcatacgttcctttagaaaagccaggcccgaccggacgcagtgggtcacgcttgtaatcccagcacttagggaggccgaggcgggccatcacttaaggtcaggagttcgagaccagcctgacgaacatggagaaaccccgtcactactaaaaatacaaaaattaagcgggcgtggtggcgcgcgccagtaatcccagctactggggagaccgaagtgggagaattgcttgaacgcgggaggctgaggtagcagcgaacctaggtcgcgccactgcactccagcctgggcgacggagccagaccgtttcaaaaaaaaaaaagaaagggccgggcgcggtggctcaggcctgtaatcccagcactttgggaggccgaggcgagcggatcacgaagtcaggagttcgagaccagcctagttaacatggtgaaaccccctctctactaaaaatacaaaaattagctgggcgtggtggcgcgcgcctatagtcccagctactcgggaggctgaggcagaagagtcgcttgaacccgggagacagaggttgcagtgagccgagatcgctccactgcactccagcctgggcgacagagcctctcaaaaaaaaaaaaaaaggtaaagaaagccatccaaaagtgagaaggaataacaaagttggtgtaactggctattttggaaaactgtcatacggataacgggctgtctaaccctataattacgagaaaggcccgagttttaagaaatgaattcgaaaatgaagaggaaggaactcttcctataagtgggagcttatatataagacgcttccttttaaaccgattgtacagtgtggtaggactagggtaggaaactggacggcatggagacttctgtgttaaaacacaagagaacccttaacgttaaaacctcaagcttccggagcatgtcggcgggagggacttaacagcggaacccaacattccccggtgaagttttccagccggagtcagggtcagaggcagcctttcctactgcgcaggctcagtgctgcttacccatcatggaagcaatgtggctcctgtgtgtggcgttggcggtcttggcatggggcttcctctgggtttgggactcctcagaacgaatgaagagtcgggagcagggaggacggctgggagccgaaagccggaccctgctggtcatagcgcaccctgacgatgaagccatgttttttgctcccacagtgctaggcttggcccgcctaaggcactgggtgtacctgctttgcttctctgcaggtaggaggccataggaggggcgatgggagccggggctttgaaagggatttaagtgctaaccgatctcagtcgccttcttctcgaagttttccgtagggagctaagtgaatacaccgaaggtcttacctctgaacccctcacagcctagggacaggagcggccggcttacctggtgggttgggggacgtcggcagctcgcgtactacgccagcaggattgaggagcagagaaacagttgcagttggttgtattcagtacctgcatttccgttgggaactccacctgtacttgttattctgtggaacttttttttatttgtagaaggagcaagaatattgaccttactatatagcacacgaaacaatctatgctgtatcgtgcctgctcaatccttaaagttaacttctaatgatagtaaaagaccttcctgctgcctttaaaatgcagcttgtgctagtaacatgcatgtgtcaaattgaagaattagacatagatgactagatagaaagtaattttgtaggtaattttagagttcaactccacccagctttcagtgaaggaacctttcaaataatagatttttgcttaccatagagaaaagatcaaatgacaaagcaaatattgaccattaagctggaatatggtgataattgaacagttgtataaatgaagtaattgaattgtacacatacaatgggtgaattttatggcatgtcaaagtatacctcaataaagctatttttttaaattgcccatgacctcttttcccatttgtttgtgtgtctttccaattctttttctatacagcttcttcacagaaatcacattttataaaattttatatcgtttttactcgacattactttttcatttatttaccaaatacttattaaacatttatgtgctaggccttattctatgccctagggatacaaaagtggaaagctagataagagcagtgtcctcatgaaactttaaacatctacctatattaattagatctaaatgtatagcctgttaaatggcttcatcgggataaaccttaatcatcccttattgtttgtacattcagagggttttttcctagtttattgcaaagagcagagaacatctttatgtattttatattatttcatgagtattaatttttaaaattggctgtttttaggctttgcattgcaaaacacattcccaaaaacaaaatgccaacttactctttttttttttttttttttctgagatagtctcgctctgttgcccaggctggagtgccgtggcgtgatctcggctcactgcaacctccaccacccgggttcaagtgattctcctgcgtcagcctgccaagtagctgggtttacaagcgcatgccaccacacctggctaatttttgtatttttagtagagatgaggtttcaccatgttagccaggctggtctcaaactcctgacctctagtgatccacctgccttggcctcccaaagtgcttgggattacaagtgtgagccaccatgcctggcctacctatttacattcttactggcactaatgagagtatctgtcttaatatactactttctgtagcattgactgacattttttataaatttttttttttttttttttgagacggagtcttgctctatcgcctaggctggagtgcagtggcgcaatctcggctcactgtaagttctgcctcctgggttcacgcccttctttctgggactacaggcgcccgcccgccaccatgcccagctaatttttttatttgtttttagtttttagtagagacggggtttcactgtgttagccaggatggtcttgatctcctgaacttttgatctgcccgcctcagcctcccaaagtgctgggattacaggcgtaagccaccacacctggccattttttataaatttcttaatttgtttagtatcttctcccccaaaaacctttgttaccagtaaaagtaaaccattttacatatttattaagaattggagcccaagcacttttcttctaaaatttatgctctgttaagaatattaattgcaaatagttacaagtaatgccaccattttttcttagcttctaggtttggtggggggttttttgtttagttttctttttgagatggagtctcactctgtcacccaggctggagtgcaggggcgcaatctcagttcactgcaacctacgcctcctgagtttaagcaattctcttacctcagcctctcgagtagctgggactacagtgtgcaccacatgttgggctaatttttgtatttttggtagagctgaggttttgctgggatagccaggctagtctcgaactcctgacaagtgatccacccacctcggcctcccaaagtgctgggattacaggtgtgagccaccacacccggctggccagcttttagttgtatttgtattttatattacaactataggagtcaaattataagcaaatttgttacaaggtcttcaaaagaagcctggattttatttgcaaaacattataggtatagctgtttaataaacttacccttattttcaataggttcataaaaatttgggaccagaattgaaaattttttcaaataaaaaatataggccgggcatggtggctcatgcctgtaatccgagcactttgggaggccgaggcgggcagatcatgaggtcaagagatcaaaaccatcttggccaacatgttgaaaccccgtctctcctacaaatacaaaaattagctggctgtggtggtccacgcctgtagtcccagctactcgggaggctgaggcaggagaatcacttgaacccaggaggcggaggttacagtgagctgagatcgcgccactgcactccagcctggcaacagagggagactccgtctcaaaaaatatatatagagagagagagcatgcacttggcactcaatgtttttattgtatttcattatttcctctgaatccattttgttttttattgtatgttatttattctttatttgtgtttttttaaattgttattttttttttttttttttttttttttgaggcagagtctcaccctgtctctcaggctagagtgcagtggttcgatcttggctcactgcaacatctgcctcccaggttcaagcgattttcctgcctcagcctctggagtagcgggattacaggcattcaccgccacgcccagccaattttgtatttttagtagagacgggctttctccatgttggtcaggctggtctcaaaactcccgacctcaggtgatccgcccaccttggcctcccaaagtgctgggattacaggcgtgagccaccgcgcccagccacgccaggctaatgtttgtattttcagtagagacagggtttcaccatggcggccaaactggtctcgaactcctgacctcaggtgatccacctggcccggcctcccaaagtgctgggattacatgcatgagccactgagcatggcctgtttgtttattttataaaaatggggtcttgttctgtctagagcctttcccctctagactgcactgtcagctctcatatcaggtgacagagcaagaccctgtctttataaaataaaccaaacatgaataacatacaagaaaaaacaaaatgataagttggattcagaggaaataatgaaagacaataaaaacattgagtgccaagtgcatgctctgtattttttatttgaaaaaattttcaattctggtcccaaatttttatgaacctattgaaaataaggatgaatttattaaagagctgtacctgtaatattttgcaaataaaatccaggcttctcttgaaaatcttgaaacaaacttgcttaatttgactcctatagttgcaatataaaatataaataaaactaaaagctgactggatcacagctccctacagcctccaagtcttgggctcaagtgatcctcccgcctcagcctaccaatagttgagactataggcgtgtgccagcacacccaactttttttttttttttttttgagacggagtctcactgtcgcccgggctggagtgcaatggcgcaatcttgggtcactgcaacctctgcctcctggattcaagcaattctcctgcctcagcctcccaagtagctgggactacaggcatgcatcaccatacctggctaatttttgtttttgtttttgttttgttttgagtctagctctgtctcccaggctggagtgcagtggcacaatctcggctcactgcaacctccgcctcctgggttcaagtgattctcctgcctcagcctcccaagtagctgggattacaggtgcccgccactatgcccagctaattttttgtgtttttagtagagacagggtttcaccatgttggctgggctgctcttgaactcctgacctcgtgattcgcccacctcggcctcccagaatgctgggattacagacgtgagccaccacgcctggccaatttttgcatttttaatggagatagggtttcaccttgttggccaggctggtcttgaactcctcaagtgatccacctgccttggcctcccaaaataataggattacagcatgagccactgctcctggtctaatttttaaaatcccttcttaaattcacaagtcattcaaacgtgtggattaaacattatctattctgctgatttaacattttaatataaaaaacaggaagctattaatttgtaatgtaatgaaagctatgatgttttgatggagaaagtactatggacacaaaatggaaaaaagcattaaatctcttttcaggggtttagattaaggaaatctccaaattggttttcttttgagctggactttaaaaataggagtagatatatatataggaagcaagcagtagtaaaggcatcagtaactcttggatttgcatgaataattcattctaacaagatcttcagtttaagggaaagggagaagcagggaaaaaataataattgctttgttattggtggctcatttcatcctgtcagcaactctgtgaggtaggtactattgttttttccattatacaagtatgggaactgaatcacaaagtttaagtaacaactgaagtgaccagctacagtgtaaagaagccaggaccctgtggtttttctctgttctaaaaccgttacacccaatctgcctctcacattgccttgtatgccttgtcagttgatgaaatatctaaattgattcccagtgtatgttccaaggaacattagttcatcaagctgctattaaaaaaaaaaaaaaagaggccaggcacagtagcttacaccagtaatcccagcactttgggaggccgagacaggtgcatcacgtgaggtcaggagttccagaccagcctggccagcttggtgaaaccccatttctactaaaaatacaaaaattagccaggtgtggtggtgcatgcctgtaatcccagctactctggaggctgagacaggagaatcgcttgaacccagtaggtggagattgcagtgagcagagattgtgccattgcaatccagcctgggcaatagagcaagactctgactcagaaaaaataaataaataaaatgaaaagaatgcctcggtcaagtttggagaatagccagatgtgctatcctctatgtagacgtttacagtctttatgagaatatcaacatctttgagaagcattgctgtaaaaaattttgacttggtttaatccagtattcctccaatttatgtgaccactaaaatacctactaatagatgcatctcttatatagtaggatgtcattgaatatatatggtagagaagtaacataatcagttttgtgttttagaaagctcattcttggccaggcgcagtggctcgtgcctgtaaccccagaactttgggaggccaaggtgggcagatcacaaggtcaggagttcgagaccagcctggcaaacacggcgaaaccccatctctactaaaaatacaaaaattagccgggtgtggtggtggatgcctgtaatcccagctactcaggaggctgaggcagaagaattgcttgaacccaggaggtggaggttgcagtgagccaagatcgctccactgcacttcagcctgagcgacagagctagactctatctcaaaaataaaagctcagtcttggaccgggtgtggtggctcatgcctgtaatcccagtactttgggaggccaaagtgggaggattgcttgaggccaggagttcaagaccaacctggtcaacatagtgagaccccatctatttaaaaaagaaaaaaaaaaaagaaagctcattctggtggcaatggggagaatggtttggaaggaaagattggagtcaggaaaatcaattcagcccagcctttcttctctagactgcactgccagctctcatatatcagatttccatgtaattctggtctatacactttagtcatctcaacaaccctgtcttaattactgtagcttataaaagctacactaggccagaagtgttggttcacgcctgtaatcccagcactttgggagacagagacgggtggatcactagttcaagagagcaggaccatcttggccaacgtggtgaaaccctgtctctactaaaaatacaaaaattagctgggcatggtgatgtgcgcctgtagtcccagctactcaggaggctgaggcaggagaatcacttgaacctgggaggcggaggttgcagtgagccaagattgcgccactgcactccagcctcttgctcttgcgacagagcaagactccgtctcagggggaaaagaaagctacactatattatagaagcgctattatctgatatgaatagtcttctgattgttcttcagggtatgtttgctgtttttgaccctttttccaaataccttttttatgggggaagacagagcctcactgttgcacaatcttggctcactgtagcctccgcctcctggattcaagtgatccccctgcttcagcctcccgagtagctgggactacaggcatgcaccaccacgcccagctaatttttgtatttttagtagagacgggattttgccatgttggccaggctggtctccaactcttgacctcaggtgatccaatccttcttggcctcccaaagtgctgggattacaggatgagccaccatgcccagcccccaaatacattttagaattagcttggtgatgttcaaggaaaaatcttgctgacattttttcccccttgtgacagagtctcactctgacgtccaggctggagtgcagtggcgcagtctcggctcactgcaacctccacctcccaggttcaagcgattctcctgcctcagcctcccaaatagctgggactacgggcatgtgccaccatgcccggctaattttttgtatttttagcagaaatagggtttcaccgtgttagccaggatggtctcgatctcctgacctcgtgatccgcccacctcagcctcccaaagtgctgggattacaggcgtgagccacagtgcgtggcccttgctggcatttttattggaatttcactgactctactgattaatataaggagaactgacatttccaatataaagcctttctgtctctgatactatggtatgcttccatttattatatgttggccttctttactatctgttaatagttttataattaaggtcttaaatgtgtattgagatgattatgtcattgtgtccattaatctgttcttatgtgtagacattccttttgcaaatatagtctgttactttctcatacttcagtatcctctttaatttctttaaatatattaaacatttatatctgcttctaataattccagtttctgcagtctgtatatctgattctgttctttgttctagtaattcattcggggtgactcggttccatgtgtattttgtgatttttttaaatgtaagcacgtttctttttttttttttttttttttttgatacggagtctagctctgttgcccaggctgaagtgcagtggcacaatctcagctcactgcaagctccgcctcctgggttcacgccattctcctgcctcagcctcctgagtagctgggactacagtcacctgccaccatgcccggctaattttttttttttttttcagtagagatggggtttcacacctgggattacaggcgtgagccaccgtgcctggccttttgttttcttttgttgttgttgttgttttgttttttgcacgtgtttcttagaaccatatttgtggtaatattttggtgatttactttagcttcagccaggtagctaagggcactacctacctctcatcactctaaaattttagattgagatttttcaggccatagaggtcatataaattcagggatcaaacccaagagcattcactgtggaatgctgtgaaacaaattgtctcaagaccttgtagcttaaaaccataattaaatctttccagcctgtgtgctggcacacacctataatcctggcactttctgaggccgaagcaggaggatcacttaacccaagagttcagcctgggcaacatagccagaccaggaaaaaaaaaaaaaaaaagttagccaggcttggtggcagctgcatgtagtctcagctacttgggaggctgaggtggaagaacacttgagcccaggagtttgcgactagagtaagctatgatgatcatgccttatagactaagcccatgtctcaaaaacaaacaacaacaagaaaaaccaatcaccttttttttcatggtttcagacaaagtatacttgtctctgcctcacaatgtttagtacctcatttggaggacccaaagactaggggctggaatcacctgaatactcatgcacttacgtatctggctgtcagctggggactttgctacagatgtcagccagaacatccacatatggtatatccatgtgacctgggcttcctcacaacctggtggctgggttcttgggcaagtgtcctaagaaagagcctgtgctagggataaccatatttccttttatgacctatccttaaaaatcttgcagtatcataagccacatccaggtttaaggagagaattagattccacctcctaaaggggaatgtagacattctacaagtgcatatgggactagaaatattgctgtagctacttttggaaaatacagtctatcacaccaagtaaaggagagtatgtgattagcaattcttagggggtgacattttttcttattttcccttctgctagaaccaagcctacagataggatgtagccccaccatatctgtctagggcaagtttttttctggttcatccagtgaaggtattgccttttgaaggtcctgtctttatgtggaggtctccttatctgtgtccaagctttatctgctgctcccttgactttaggccaccaaggatatgtagatgttctcaaagtgctctgggtcagccgcataatacctctcaggatttatgtctacctattgttttagtccttcaagtatatcccttactttcctgctagttaaaccatgcattctagaacatgtttgccttttatctcacatgttcaggtattcatcctgagggtttctctgcatatctgatttaccatattgcctaaatagaacttattaggggttatttttaatactgcttttttgggttttttcttttttttttttgagacggagtctccctctgtcacccaggctggagtgcagtggcacgatctcggctcactgcaacctccacctctcgggttcaagtgactctcctgcctcagcttcccaagtagctgggattacaggcgcgtgccaccatcatgaccagctaattttggtatttttgtagagccagggtttcaccatgttggccaggctagtctcaaactcctgacctcaagtaatccgcctgccttggcctcccaaagtgctgggattacaggcgtgagccacctcacccagtgaaaggtagcaatttcattagtaagagtcgatatgaatgcaatccttttgggaataatgagaaatgacactactcgcaagtatggctatattggctgataatatagcatgtgacaatgtttcttgatctgcagagatatgagctcatttttctttttaattttcttttctttttttttttttttttttgagatggagtttcactcttgttgcccaggctggagtacaatggcatgatctcggctcactgcaacctctgcctcccaggttcaagcgattttcctgcctcagcctcccaagtagctgtgattacaggcatgtgccaccatgcccggctaattttgtatttttagtaaagactgggtttctccatgttggtcaggctggtctcgaactcccgacctcaggtgatccacccaccttggccccccaaagtttgggattacaggcatgagccactgcacccagcctttttaatttttttctcttagtgatcttttaaagacaacttctgttttatagggataacgcctataatcccagcaatttcataattgaaagattttattcattgaaaatccagtttttaatattatttaaattgtggtaagacatacataacaagaacttaccattttaaacttttttttttttttttttgagatggagtttcactcttgttgcccacactagagtgcaatggcatgatctcggctcactgcaacctccgcctcccaggttcaagcaattctcctacctcagccccctgaatagctgggattacaggcacccaccaccaccatgcccggctaatttttttatatttttattagagaatggagtttcaccatgttggccaggcttgtcttgaactcctgacctgaggtgatccaccttcctcggcctcccaaagtgctaggattacaggcgtgagccactgcgcccagcgattttattttattttatttctttatttattttattttatttttttgagacggagtcttgctctgtcgcccaggctggagtgcagtggcgcgatgtacgctcactgcaagctccgcctcccgggtttacttacaccattctcctgcctcagcctcccgagtagctgggactacaggctcccgccaccacgcccggctaattttttgtatttttagtagagacggggtttcaccgtgttagccaggatggtctcgatctcctgacctcgtgatccgcccgccttggcctcccaaagtgatgggattacaggcgtaagccaccacgcccggcgattttaaacatttttaagtgttcaattccatggcagtaagcactttcatagtattatgtaaccatcaccactatttcatcatcccaaatagaaactctatacctgtttagcattccttttcccctcctctcccaagcctctggtaaccaccattctttctatctctatgaatttgtctattctaggtaactcgaataagtggaatcatacaataattgttattttatgcctggcttatgctaattagcatactgttttcaaagttcatccatattgtggcatgtatcagaacttcatttctggttgagctcagtggctcacacctgtaatcccagcactttgggaggctgaagtggaaggatcccttgagaccaggagttcaagaccagtctggacaacatagtgagatttcgtctttacaaaaaataaaaataaaaaaattagccagtctgggtggcgagtgcctatagtcccagctacttgggaggctgaagtgggagaatcccttgaatccaggaggtcaaggctgcagtaagctctgatcagtctgctgcattccggcctgggtgacagagcaagtccctgtctcaaaaaaaaacttcatttctttttatggctttattaatattccattgtgtatatatacatacatatatatatgtatgtatatataccacattttgtttatcattcatctaatgataggcacttgggttatttccaatttggggctattatgaataatgcttctatgaacattggtgtacaagtatttatttgagtaccggttttccttttttttttttttttttttgagtataattgctgagacatatggtaattctgtatttaaattttttgagaattgacaaactgttttctgcagcaactgtacagttttacgttgccaccagcaatgaactatggttccagtttctccacatctttgtcagcatttgtaattttccattttttggactatagccatcctagtaagtgtgcagtgatgatgtcacattgtggttttgattttcatttccctgatgactaaggatgatgagcatcttgcatcttttcacatgcttattggccatctatatatcttctttagagaatacctattcaagtcctttgcccattttctgattctagtttcattttaaagtcatgattttttttttttttttttttttgagacggagtctcgctctgtcaccaggctggagtgcagtggcacgatctcagctcactgcaacctccacctcctaggttcaagagattctcctgccttaacctcccgagtagctgggactacaggcgtgtgcccaccatgcccagctaattattgtatttttagtagagatggggtttcactatgttggccaggatggtctcaatctcttgacctcgtgatccacctgcctcggcctctcaaagtgctgggattacaggcatgaggcactgtgcctggccaagtcatgatttcttagactgggttctgtggacacatcctaatagaagaggatctagctctcttagtttcagcttcctttgggaacccaggcctctgggctccagtaacactgcctccttcctttaccttgccaaccgagggttggtagtcacttcttgctatctctaaactctgggttacttcactgttccttttgtcccttagatcctccctcagttatgcgtcaaaatctttgcattaaattcttgctgttgtaactatttgatgtggtttctgttaccccgaatagatcttgacatagcatctaaattccctcattttataggggaagaaacttgtaccattttgtcttccaaatacattttagaattacttggtcatgttaaaggaaaaacattgcagctattccttcccataacatacttctcagtcgtaactagcaatctagcagtcataatcacttttttttttttttgagatggagtctcactctgttaccaggctggagtgcagtggcacagtctcagctcactgcaacttctacttcctgggttcaagcttttctcctgcctcagcctcccaagtaattacaggctaggattacaggcctgagccaccgtggccagcctcataatcacatttaatacaaaataaagtcacgttgtaaagactcaaatttatacatcacaatgtataaaggtaaaaattttatttttaaagaataaaattacaaaaattaaagaatttctccaaattcatatagttagtaaaaagacagatagtgttgggaccatgatgccttcatgcccagtccatttcttgttctaacaaattaaaacttcccgggttggagtgggagaggagcttttttcctttatatggttttttttttggttttggtttttcttttttttttttttttttttttggtagagagaggtcttgctatattccccagcctggtcttgaattcctggccttaaacagtgtgcccgccttccaaagtgctaggagctgggattacaggcatgagccaccacacccagcttcttactgatttattttcttttcttttttttttttttttttgagacacagggtctcacattgtcacccaggctgtagtgcagtggtgtggtcatggttcactatagcctcaaaatcccaggctcaagcgttcctcccacttcagcctcccgagtcagtgggactacaggcgtgagccaccatgcccagctaatttttaaaatttttcttttgtgaaaacagggtctcactatgttgaccaggctggttttgaactcctggcctcaagtgatcctcttgccacagccttccaaagtgctgggaatacagacatgagccactatgcccagctttgatttttttttaaccatataaatctattacctatttagaataaactaattttaaattttttaagtaaaataaaatgtttacccttataaattatgatgtataaatttgagtctttacaaaatgtctttactttgtattaaatgtgattatgattgctagttatgactgagaagtatgttatgggaagactactaagcatacaattgtgcatgagcttatacacaaacacacacataatgtagttctacatctagaaattacattaattttattattttctgtttcctagaataatggtctcaaactctttggtcacattttcctatcagtaaaaaatgttgagtttttttatttatttacaatatatcataagtatatggactaatgtgtacattaaaaacattaacaaaaacttacatttataaaaaacaaggtaaacaaattagggggagatggctgagcactgtggctcactcctgtaatcccttcactttgggaggcagaggtgggtggatcacctgaggtcaggagttcaagaccagcctggccaacataatgaaatcccgtctctactaaaaatacaaaaattagccaggcgtggtggtgggcacctgtaaacccagctacttaggaggctgaggcaagagaatcgcttgcacctgagaggcggaggttgcagtgaactgagatcacaccactgcactccagcctgggcaacaagagcaaaactctgtctcagaaaaaaggaaagaaaagaaaattagggggagacatcctaatgctttttctccaccaccccaaaagattattttgtgcatcctagggtgcacctgtcttagttggacattgttctagaatgtatcagttaaaagctgctgaaagatctcagacatgtgttctgttaagtgcctacaggttcaccaaacttattgaaaatagttaaaatggtccttgacttcagcttccagaactgttgtaagttccttagttcaaacacaaagcaataaaactggccccaataaaacacattagcctcaattctaagcagtttctgataaccataatcatagactaatgtgcacagcctttgaacttagcaattgcaacactaatgtacatgagactatttatcaccaaaaatcaagtaatctagggagaaaaaatgggagagggtatgtgtagagatttgagggaaacccaaaatatacacaaaatagtttatgacttaaaaaaaaaaaacgcaaaaaaaggtatgatgaggacaatacaaaactaaacctgtaaactaaacctgtttgctgggcgcagtggctcacacttgtaatcccagcactttgggaggctgaggcggatggatcacaaggtcaggagttcaagaccagcctgtccaacatggtgaaaccccatctcaaataaaaatacaaaaattagcccggtgtggtggcgggtgcctgtaatcctaactactgagctgaggcaggagaatcgcttgaactctggaggcagaggttgcagtgagccaagatcgcgctgctgtactccagccagggcgacagagcaagactcttaaaaaaaaaaaaaatggccattatctccacttaactggtgaagaaactgtggctcaagaaagttaagtaacttgcacaaatcagacctgcaattatttattggagagttgaagtaacaggtgcattagctggacagttgctcaaaatgagtccaacttaagtgataccaaaatgtcactgtattattatttgtaaggttacagaggagttttatttaccagaactatttttagggaatatagtatatgttttgggaaaataaagaatatataagttgtttggggtgccaatgggatcaagatccccttggggtatgctggatagctggctatgaaactcttcaaaagaggaagctttcctaaatggtatctacacattttcctgtaatactcaggagtagcaacctctattttctttttctataccaacaagaatgagcttggaaagcttcatccttaaatcaatgttaaacaggatttgaggactgtcaatgaagagggggccccagttgttctgagtggtcgtacatggtgtgatcctaaatctgcttaacttcaaagttagtacccttggctgtgtaccatgctgcctctagcatgtgactgaaatgcagacagacagataggtatatagatacaaagatgggaaagaattgtgaatggtgattctaaagattgtgctactggtagtcttctcacaggagtatcttggtgtcgtgttttcttaaactttgtatcataatcacacattttcaggcagcttaaatcctttaaggaacaaaaacaggataagaatgagtgaatagataggtctccactgttaaaaaaaaaaaatctaccactgtatatttgttaccctcaggaaattactacaatcaaggagagactcgtaagaaagaacttttgcagagctgtgatgttttggggattccactctccagtgtaatgattattgacaacaggtaatatatcttttaacaatgtagaaatttattggcaataaatatgcagtgatatactcaaaagacacacaaaaaactaatgtgagtggctgagaacatcttgtatgaaaagtctagggctcggtgccatggttcacgcttgtaatcccagtactttgggaggccgaggtgggcggtctcaggagtttgagaccagcctggccaacatggtaaaaccgcatctctactaaaaatacaaaaattagctgggcattgtggtccagctactaaagaggctgaggcaggagaatcacttgaacccaggagttggaggttgcagtgagctgagatcaagccattgcactccatcctgggcgacagtgagacttcatctcaaaaaagaaaagaaaagtctacataaaataacttcacagcggggcacagtggcttacgcctgtaatcccagcactttgggaggccgaggtgggcagatcacctcaggtcaggagttcaagaccaacctggccaaacatggtaaaaccccgcatctactaaaactacaaaaattagccgggcgtattggcctacgcctgtaatctcagctacttgggaagctgaggcaggagaatcgcttgaacctgggaggcagaggttgcagtgagccaagatcacaccattgcacttcagcctggatgagagagcaagactccgtctcaaaaataataataataataacttcacatttgtttttaaatgacagcgtgattgaaataaattttttaacttctgttcggattttttttcctgacatgggtacttctctttacatctatagctttaaaaagttttattataaatttcaaaaacatacaaaagtataaagaatagtatcataaacccccatttgcctattacctaaacccactgattatcgagactttactatacagtgcttgtttcttcacctatccctaacttaacatcttttgtgtatatgaaacattttaaagaaaactccaaccaccaggttttttaccccaaggtacttaggtctgcatctcttaagaagatgggacacttttcatctagctacagacagccattatcattacatctaacaatattaacaataacagtaattctttggtgtccaccaacacccagtccatatcagaatttcttcaggtagctcaaagatttccttttacaattggtttactcaaatcaggatttcgacaaggaccacacattatagttggttgatattctgcatttaattacccttttctccaaatcagtggatttgttgaagaaactgaattatgttgtcatacagaatgtcctgcattctggatttatctgtttgtttcctgtatgtctacgttcttttttttttttttttttttttttttgagacggagtctcactctgttcccgcccagcctggagtgcagtggtgccatctcggctcactgcaacctccacctcctggattcaagcggttctcccccctcagtctcccaagtagttgagattacaggcatccaccaccacacctggctaattttttgtatttttagtagagatggggtttcaccatattggccaggccaggctgatcttgaactcccgacctcaggtgatccacctgcctcggcctcccaaagtgctgtgattatagccatgaaccactgtgtccggtctttttttttttttttttttgcacacggcaaatcagatttgggtctaactttttggggggcaagaatatttcataggctgtactatgtactttgcatcatatcaggagacacgtactatctgttagacctatagtgaatctacagttgatcagtgagttcagatggcaatgactccctttattttaaagacccccgtcaaactttcatatgttctcatgcctattgcctgaatcattaattacctagaagttgcaaaatgcttagtttccaatagtctcacatattctatgtgtactatctataattcttttgtaaaacagaatcttcactattaattaaggctacttagttaccctgctatgtataataatttgaaacaaaaaaacaggataggtgcttaattttttccccttaattgacatttttcagaataaagagttgatacgccgtacacctacagtcgtgatctattgtttgtttcttgaatgggaggacacctaactttcattaggaaattacgcgtttttatgtattcggtgtttcaggttcagtcatatgttctttaatactaaattgtcttatgtttggccagagagtctctccatgttggcttatatgtccttttcatatgacctctgtcttttatgatttccttcctttctttcaagtacaatgagattttccagtactatcttgtatactttcctgctccaattctgaaatcagccatttctccaaagagcctttgtttgtcttagtagggaatggtatttagagtccataaccagcatagtaggagtgttcattgcaatagtgttatttatttatttttttagacagagtcttgctctgttgcccaggctggagtgcagtggtgcgatcttggctcactgtagcctctgcctccctggttccagcgagtctcctgcctcagcctcctgggtagctgggattacaggtacacgccaccatgcccagctaatttttatatttttagtagagacaggggtttcaccatgttggtcaggctggtctcgaactcctgacctcaggtgacctgcctgcctcagcctcccaaagtgttgggattacaggcatgagccaccacgcctggccgctatagtgttattatttctcattgctacttgacctttatagtggacagagctaagatgtatgttttttatgtgcttttgtattttttagagacaggatctcactgttacccagggtggagtgaactggcgtgatcacacttcactgtagccttgaactcctgggttcaggcaatcctcctgtgtcagcctcccgagtaactgggactacaggcactcaccaccacacctggcttttttttttttttttttttttttgagatggagtcttgctgtgtcgcccaggctggagtgcagtggtgccatctcagctcactgcaacgtccgccacctgagctaaagtgattctcctgcctcagcctcctgagtagctgggattacaggcacacaccactacacctggctaatttttgtatctttagtagagaaggggtttcgccatgttggccaggctggtcttgaacttttgacctcaagtgatccgccctcctcggcctcccaaagtgctgggattacagacgtgagccactgcgcctggcctatttttttttttaaaggaaaaaaatcagaaatatatacagatgattacaattcaaagttaatatttcaggggttttgtttaacgtcattgatatttacaatggaatctctggttgggtgtggtggctcctacctgtaatccaagcactttgggaggccgaggtggacagatcgcttgagcctaggaatttgagaccagcctgggcaacgtggtgaaaccccgtctctactaaaaatacaaaaattagctgggcatggtggcatgcccgaaatcccaactacttgggtgactgaggtgagaggatcacctgaacccagaaggtggaggctgcagtgagccaagatcatgcccactgaactccagcccggataacagagtgagatcctgtctcaaaagcaaaaaaaaaaaaaaaaaaaattgaatctcttttctgtcacactgaaagtcctttccaagaacatgaacataattacttattttcttctttaatcttttcaagaatttcagggccgggcgcattggctcacgcctgtaatcccagcacttggggaggccgaggtgggtggatcacgaggtcaggagttcgagaccagcctggccaacatggtgaaactccatctctactaaaaatacaaaaattagtggggtgtggaggcacgcgcctgtaatcccagatactcgggaggctgaggcaggagaattgcttgaacccaggagatggaggttgcagtgagccgagatcgcgccattgcactccagcctgggtgacaggatgagactccgtctcaaaaaaaaaaaaaaaaaagaatttaataaaacatgaaagaaggggctggtattatggtattatgtatactcaaaacagtaaatactcaaaactaatactaaatacaatatgactgattatgatgcctgcaatttactttaagataattcagaaaaaaataaatacctatatagattaaccccaaatgacaaaatataacaatttaaaccttagtggaaggtactggagtgtttctttttttcttttttttttttttttgagacggggtcttgctctgtcacccaggctgcagtgcagtggtgtgatctcagctcactgcaacctcctcctcctgtgttcaagccattctcctgcctcagcctcccgagtagctgggattacaggcgcccaccaccatgcccagctaatttttgtatttttagtaagacagggttgccaggcgccgtgactcacacctgtaatcccagcactttgggaggccgaggcaggaggatcatgaggtcaggagttcgagaccatcctgaccaaaatggtgaaaccccgtctctactaaaaataaaaaaattagccagatgtggtggtacgtgcctgtaatcccagctactcatgaggctgaggcaggagaactgcttgaacacaggaggtgaaggttgcagtgagctgagatcacgccgctgcactccagcctggtgcgacagagtgagaccccgtctcaaaaaaaaaaaaaaaaaaagacggggtttcgccatgttggccaggttggtcttgaactcctgacctcagatgatccatccgccttggcctcccgaagtgctgggattacaggccggagccaccttgcccgacctgaaaatttagctaggtgtggtggcacgcaccctgtagtcctggatactcaggaggctgaggtaggaggattgcttgaggccagaagttcaaagccagcctaggcaacatggcagaaccctgtctctaaaaattaaaatgaaaaataaaaatgaattttgggccagccgggtggctcacgcctgtaatcccagcactttgggaggccgaggcaggcggatcaggaggtcaagggttcaagaccagcctggccaacatggtgaaaccccgtctctactaaagatacaaaaaattagccaggcgtggtggcatacacctgtaatcccagctacacaggaagctaaggcaggagaatcgcttgaacccaggaggcggaggttgcagtgagctgagatcgcaccactgcactccagcctgggtgacagagtgagactctgtctcaaaaaaataaaaaagaaaaaaaaaagaaaaagaaaaggcagtaaagtttaggtgagctgtgaacaaattagctttggcaaaacatatatctctttctgttgaaccttcatgatatcatacagaaatgtaaactgtgaatagtggagagagatgatgagttttgtgcttcagaatgattactctaatgaaagtatggattgaagagatcaagattgtagatgagtctattgtctttgtcccagtggagggaggatatctcaaattagggtagcagcaactgagatggagatgatgggatgaattcaactctttttttttttagagacaaggtgtcacgctgacacccaggctgtttaggcagtggtgcaatcttagctcactgcagccttgaactcctgagtagctgggactacaggtgtgggccaccatgcctggcttattttttaacttttcgtagagatgggttctccctgaattactcagtgatatgatttcgatctgtgtccccaccaaaatctcatgtggaactgtaatcctaacattggaggtggggcgttggatcagtaggaggtgattggatcatggaggcagatttctcatgaatagtttagcactatcctccttggtactgtccttgtcagtgagttctggcaagatctgcttgtttagaagtgtatagtacttcctccctctctctcttgctcctgcctctgccatgtaggatgcttgctccccctttgccttctgccatgattggaagcttcctgaggcctcctcaaaagtggaaactgctatgcttcctttatagcctgcagagccatgagccaattaaacctcttttccttataaattacccagtctcaggtatttctttatagcaatgtgagaaggaactaatgaacccaggctggtttggaactcctaggctcaagcaatcctcccacctcagcccctcaaagtgctgagattatggatgtgagccaccacgcgcagccccagccccaaggttttgttttcttttgtttttttcattttatttgagacagagttttgctctgtcacccaggatgaatgcagtgacacaatcacggctcactgcagcctaactcccgggtgcaagggatccttccacctcagcctcccgagtaactgggaccacaggcatgcaccaccttgccagctaccttttttttttttcggtagagatggagtcttgctagcttgcccaagcaggtcttgaactcctggactcaagcagtctcccactttggcctcccaaaatgctgagattagaggcgtgagccagcgcacctggcctccagtattatttaagaggtagaaataggccgggcatggtggctcacgcctctaatcccagcactttgggaggccgagggggtggggggcagatcacctgaggtcgggagttcgagaccagcctgaccaacatggagaaacccggtctctactaaaaatacaaaattagccgggtgtggtggcacatccctgtaatcccagctacttgggaggctgaggcaggagaatggcttgaacccaggaggcagaggttgcagtgagccgaaatcacgccattgcacttcagcctgggcaacaaaaacgaaactccctctcaaaaaaaaaaaaaaaaaaaaaagaagtggcaggaattcaacgaacaaaagaaatttgggataatggaaacccacctagatatctaggtggataaagattagcgagggtagtttgcaaaggaggagaattgggtatgaagagataataaattaggcatctttagcatatgggaggatgaaagtctttggggtgggctgggtgcagtggctcaggcctgtaattccagcactttgggaggctgaggtgggcggatcacctgaggtcaggagtttgagaccagcctgaccaacgtggagaaaccccatctctactaaaaatacaaaattagccgtgtgtggtggtgcatggaggctgaggcaggagaatcacttgaacctgggaggaggacggtgcagtgagccgagatcacaccactgcactccagaatgggcaacaagagtgaaactctgtcttaaaaaaaaaaaagaaaatctttggggtgaatgaaattgcccatggattaactggagtgataagaactggggatcagttagaggaaaataaaaccacaaactataatgaggagaattggaagcattgagatgtaaggtgggaatacttgagaaaattataaggaaaatgagaattatctgctcagtattaaacaaaattagcatcaaatggtataagaaatttggtaccctgctttttttactagagagtatttttagcatttttctatgtcattaaataatcattaaaagtctttaatgattgtaaagatttaatcgtgaagatgtaccataacatttaacattctcctactattgaatatttaaatctttctaatatttaagcacttacaatttttttagcaaatctctttgaagttctgactctttccataaatgaatttctagatattgaattactgggtcagagtataggactttttctttggggtttttttttgtttgtttttggagacaaggtctctgccatcaggctaaagtgcaatgacatgatcctgtctcactgcaaactctaacttctgggctcaagcaatcttcccacctcagcctcctaagtagctaggactacaggtgtgcaccaccatgcccagctaattttaaaaattattttagatccagagtcttgccatgtcacccaggctggtctccaacccttgggctcaagtgatctgcctcagcttcccaaagtgctgatattacagcatgagccaccattcccagtctatatagaactttttatagttttcttcatctaggtactaaacaattcttgttaaagttattttgattcttttttattattattgctgtgaaaaagattttttggttaagaatttactgctagtatgtagctttattgattttttaatgtatttattttatattcatcactttgaaacttctgtaaaaagcctaccagttttaacttgattccctaaagttttgtaggtaaatcatctgcaaataatgctaatacaatctttcatgttttcaacatatgcctcttatttctgattcctttttttttttttttttttttttttttgagacagagtctcgcttgtaacacaatctctgcctcctgggttcaagtgattcttctgtctcagcctcctgagtagctgagattacaggcatacaccaccatacccggctaattttttgtttttttagtaaagatggggtttcaccatgttggtcaggctggtcttgaactcctgaccacaaatggtccacttcccaaagtgctgggattacaggcatgagccactgcgctcagccctgatccatttcttatttctttgagtggatttccttaatctatgttaaacaaaaaagggaaagcaggcaactttatccgtatttatgatttgattgacaacatatccagtgtttaaccattaactgtgttgttactggtgtgtgtttgtttgtttgtttatgagacggagtcttgctctgttacccaggctggaatgcagtggtgcaatcttggctcacagcaacctccacctctcgggttcaagcaattctcctgcctcagcctcccaagtagctaggatcacaggcgtgtgccacccacccagctaatttttatatttttagtagagatagggtttcaccatgttggccaggctggtctcgaactgctgacctcaggggatccacctgcctcgaactcccaaagtgttgggattacaggcgtgagccaccgtttctggcctgctgattattctttataatattaggcattggtgggaattgatgttcactgtatttgatttggggtggggatcccattcatttcagtatgctacaaagagatgaaggaaaaagtttagatttattcttgatcttacttgcttcatggtaaactactggggtcaccacgggagaatttcttctgtttataccagtggatttatagagccagactgcccagactgaaacccaagtttaaagtttttaattgcgtaacctaggcaagttactgaattctgttcctaaatttcttcctccgtaaacctcgaaagatacatggttttgagttaatttgtgaaaggagttatgggttcctttgttttcaaagatgatatcccaccctcttactctgtgagtgttgtgatttgttttttcacattaatattgtaaccgcccaaggggttcaccttgcccactgcctagacagagccaatttatccagatggagagctgcaatggtgaaagagtaattcacgcagagctgcgggagaccagagttttactgttactcaaatctgtctccctgagcattcaggcagcagagtttttaagcataatgtggtgggtggggcgaagccagtgagctgattggtcagagacgaaatcatggggagtcgaaggtctcttcttgggctgagtcagttcctgggtgggggactacaagatcagatgagccagtttattgatctgggtgatccatcaagtgcagggtctgcaaaatatctcaagcactgatcttagcagtttagggagggttagaatcttgtgtcctccagctgcatgactcctaaaccataatttataatcttgggcctaactcgttagtcctacaaaggcaatctagtccccaggcaaggaggtctgctttgggaaagggctgttaccgtctttgtttaaactatgatctataaattaagtttctcccaaagttagttcatcctatgcccaggaatgaacaaggacagcttggaggttagaagcaagatggagtcagttaagttagatctctttcactgtctcagtcataattttgcaaaggcaatttcaatattagtaatcgtgttttttctcaggcactccatttgcacaatgtcctgcctgtgcagtgtctgctttggcccagtaatgcaaatgttttcggggacaaatctgttttggagatcttggttattaagatctttactctgatagaaagcaatgtgcattcagtacactcctcaacttgggatggggttacatttggataaacacctcctaagttgaaggtataaagcggggagtttttggtttttgttttttgcttttgagacagggtctcactctgtcacccaggttagagtgcagtggcaggatcatggcttactgcagcctccacctcccgggctcaagtgaccctcctgcctcagtctcccgagtagctgggactacaggcacacgtcaccacatctagctaatttttttggtaattattttagagacagggttttgccacgttgcataggctggttttgagctcctgagctcaagcaacccacccacctcagccttccaaagtgctgggattacaggtgtgagccatcacacccagactagagtgtgttttttgttgttcttgtttttttgagacggagtttcgctcttgttgcccaggctggagtgtaatggtgcaatctcggctcactgcaacctccacctcctggattcaagcaattttcctgcctcagcctcccaggaagctaggattacaggtgcccaccaccacgcccagctaatttttgtatttttagtagagacgaggtttcaccacattggccaggatggtctcaatctcttgacctcgtgatccacccgcctcggcctctcaagaagctgggattacaggcgcctgccactatgcccagctaaatttttgtatttttagtagagacgggattttgccgtgttggccaggctggtcttgaagtcctgaactcagatgatccacctgcctcggccttccaaagtgctgggattacaagcatgagccactacacccggcctagagtgtgttttttacttatgatattttcagtttaggatgggtttattgggacgtagccagattgtaagccagggagtatatatatatatatatatttgagacggagtcttgctctatcgccaggctggagtgcagtggctaattttttgtatttttagtagagacggggtttcaccatgttgggcaggatggtctcgatctcttgacctcatgatctgcccgcctcagccctccaaaatgctgagattacaggtgtgagccactatgcctggcctatatatatatacacacatatatatatacacacacacatatatatacacacacatatatatatacatacacacacacatatatatatatatacacacacacacatatatatatatatatttttttttgagacggagtctcggagtctccctctgtcacccaggctggagtgcagtggcacaatctcagctcgcttcaagctctgcctcctgggttcacaccattctcccacctcagcctcccaagtagctgggactacaggcacccgccaccttgaccagctatttttatttttgtgtttttagtagagacggggtttcaccatgttagccaggatggtcttgatctactgaccttgtgatccacccgcctcggcctcccaaagtgctgggattacaggcgtgagccactgcgcccggtcatggcacctatattttttatatatcacatgaagaccatgtagcttcagcatcactcccctactcgtgaaatgctatagtagagggatagtaagcctattaaaagtaagtacttcaggccgggtgcggtggctcacacctgtaatcccagcactttgggaggcaggtggatcacgaggtcaagagatcgagaccatcctggccaacacggtgaaaccccgtctctactaaaaatacaaaaattagctgggcatggtggtgcacacctgtagtcccagctacttgggaggctgacgcaggagaatcgcttgaacccgggaagcggaggttgcactgagccgagattgcaccactgcactctagcctggcaacagagtgagactccgtctcaaaaaaaaaaagtaaatacttaaagaagccagtttgaagattcaagaaaaatgcatcttagtctgcttgggctcccttaacaaaataccgtagacagtgtggcttaaacaatagaaatttattttcccacatttctgcaggctagaagtccagatcaaggtcttttttttttttttttttttttttgagacggagtctcgctctgtcgcccaggccggactgcggactgcagtggcgcaatctcggctcactgcaagctctgcttcccgggttcacgccattctcctgcctcagcctcccgagtagctgggactacaggcgcccgccaccgcgcccggctaattttttttgtatttttttagtagagacggggtttcaccttgttagccaggatggtctcgatctcctgacctcatgatccacccgcctcggcctcccaaagtgctgggattacaggcgtgagccaccgcgcccggcccagatcaaggtcttgcagggtcactttcttatgaggactctcttcctggcttgcagatgaccttctcgctatgttctcacatgctggaaagagattctctcactctctccttcttccctccctcttcttaaaaggctacaagttttattggattaaagccccactcgtatgacctcatgtgatcttagttacctcctaaaaccctatctcaaaatagttacaattagtggttagggcttcagcacatgaatttgttgaggacactattcagttcatagtattccatcccagactcccacattcatgtccttatttcatgcaaaatacattcatcccatcctaacagcctccaaagtcttaactcattccagcattaactcgaaagtccaaagtctcatctaaatagcctcaccagctgtgaacctgtgaaaacagacaagttatatatttacaaaatataaggaatggagaggcataggatagatattttcattccaaaagggagaaatgggtgacaggccccaggcaaggccaaaacctaggaaggtaaactccattagatcttgaggcttgagaacaatcctctttgggcggatattcggccctccaagccctctggagcctgtggtgggaatggtagtccttctgatctctggataacttttgaggtcattcttcccttttcttgaaggacgacgcatgtttgcagccagatagctctgttgtctggtcctgtagactcttaagtccagcaggcttctttcgtcccacccgattttttctttctcctggctgttattgaggtggttgattacatgtgtggttcacacccatgctaatcacctcatcaaatggttgttcagtcacaccagagtgctctcttcagaacaagctttctctcttttttttttcttttggagatggagtctcactctgtcgcccaggctggagtacagtggcacgatctcagctcactgcaacctctgcctcctgggttcaagcgattctcctgcctcagcctcccaagtagccgggattacaggcgcgcaccaccacacctggctaatttttgtgtttttagtagagacggggtttcagcatgttggtcaggctggtcctgaactcctgacctcgtgatccaccagccttggcctcccaaagtgctgggattacaggcttgagccactgcgcccagcctcaagctttctcatttttttacaatatggacaggctgaaaattttccaaaacctttacgttctggttccttttaaacgtagcaatttcttctttatctctcaactcttacattttactataaacagtcaagaggacccaggccacaccttcaaaattttacttagaattcgcctcagctaaatatctaatttcatccttcagaagttctatcttccacaaaacactagaacacaatacaggcaggttctttgcttctttataatagtgatcaccttttctccattttccaatgtcttatctcatttttctctgagaccccatcagaatggccttaaagaccatatttccactgacattctgttcatgattgtttatgtattctctgagaagatggaggttttctctccagtctccttttcctttcctgagtcctcaccagaatcacctttaatgtccatatttctaccaaccattccttcctggcagtctaggatttttctagcattcacctcaaaactcctccaacctctacccattatctagttccaaagccacttgcacatttttatgtatctgttacttcacagtactaaaatctgtcttagtcagcttgggctgccaaaacaaaataccatagactgggtggcttaaacaacacaaatttattttctcagagtcctgcagactagaagtcccagatcaaggtctggcagggttggtttctggtaagggtcctcagcctgacttgcacatggctgccttctcactgtgcctcatgtggtggagggacagagggagacagatctcttccttttcttatagcaccaccagttctatcagattagggccccacatttatggatttatataacctcaattgcagtagtcctcccttatccacagttttgctttctgtggtttcggttacctgcagtcaactgtggtctaaaaatattaaatggaaattccagaaataaacaatttatacatttaaaatgtacaccattctggctgggcacagtgcactcacgcctgtaatcccagcaatttgggaggccgaggcaggtggatcacctgaggtcaggagttcaagaccagcctggtcaacatggtgaaaccctgtctctactaaaaatacaaaaattagctgggcatggtggcgcacgcctgtagtcccagctactcgggaggctgagacacaagaatcgcttgaatctggtaggaaacaagttgcagtgagccaagatcatgccgtcacactccagcctgggcaacagagcgacacaaagacaagaacaaaaacaaaacaaaacaaaacaaataggattatagatatatgagaggggatttattaggggagttggcccgtgattatggaggctgagaagtcccacaacaggccatctgcaagctggatgccagaagtatggctcagtccaaggccgagggcctgagaaacaagcaggccactggtataagccctagaatctaaaagccaaagagtctggagttctgatgtccaaagacaggagaagaagaatgtatcccagcttcaggagagaggaaatcacctttttgctccatgtgggtcccccactgattgtattgtgcctacctacattgatggcatgtcttcccctgtcagttccctgaatcacaggccagtatcctctggaaaccccctcataaaaatgcccagaaataatcctttaccagttctctagataatccttaatccagtcaagttgatacctaaattattattatttttgtgtgtgtgatggagtttcactcttgttgcccaggctggagtgcagtgacatgattttggctcactgcaacctccacctcttggattcaaatgattctgctgcctcagcctcccaagtcgctgggattaccgacatatgccaccatgtccggctaatttttgtatttttagtagagtcagggtttccccatgttggtcaggctggtctcgaactcctgacctcaggtgatccacctgcctcctttgtcttgcgaagtgctgggattacaggcatgagccaccatgcctggctgatacttaaaattaaccagcacacttactgtgtctaatttataaattaaacttcatcatagttaacatgtgtataagaaaaaacatagtatatatagggttcagtaccatctgctatttcaggtatccactggggatcttggaacatatcatccacaggtaaaaggaggctgctgtacctcctaaaaacctgcctccaaatacagtcacattttgggtttagggcttcaacctaacatgaatttggagggatcacagtttaatccatagcaacacgcaacagtcagtctttcagcctctcatctcctaacccagaaaaagcagagctttggaatcttactttagattatttagataagtcaaagagaagaatgaagaggaagaagagaaagagaagttttatagaggacctgtactcgtaacaataacagtaaatataaaactactactgtcagtgccaaaaaaataaatatatgatctttcttaatcctcaaaatagtctaattatttttcccatcttacagagacacagtgggaggttgagtaatttgctcaaggtcatccagctaataactggtagagctggcatttgagctgatgcaatctgggtgtacagtatatgcttcaaccactattttccacctactccatgcctgacacatgctttcacaaaggcagtctcatttaattcttagactaactgcacaagataggttttattttctttttttgtttcacaggaagaaactaaagctcagagagattaagagaatctttgtggtcacacgtttaataaatgacaatgtgaggattcaaaaacagaaagggagatggaatagattctgactttcttcagggaagcagatcaccactttgttactgtatttgaaagacgagctgggcacggtggcttgtgcatgtaatcctagcactttgggaggccgaggtgggaggatcacttgagcccaggatttcaagaccagcctgggcaacatagtgagaccccatctctacaaaaaataaaactaacctggtatggtggcgtgtgcctgtggtcccagctccttgggaggttgagatgggagaatcgcttggggtcaagaggtcaaggttgcagtgagccttgatcacgccattgcaccccagcctgggcaatggaacaagactctgtctcaaaaaaaaaaaaaaaagaccaacgtgggtttatgagtacatttaattgacatcgtatagaatcagctctattttccccttgttctgaacttcactgcaaaacatttagccagaggagctcacccaagtaaatccctcaactaatcagttaaagaggggggaaaaaatctagttctcaagaaaagaaggcataatctcagttgtaagaccactatatggggacttttggcaactttacccagtaccttaacatctagtatgatgttaaaatgcatgctgcacagatgttaacagatacctattcagtacctagaatgacactgtgctagatgctgaagaaagagaaaagcagtgaaaggtataggaaatgaataataggttttgccatgacagtcattgctgttgcatttgtggacagctatttcattatgcatgtattgaaggtcaggcctagagaggagattagagaccctttccagaatacttgggaacggtatgtgattgagaaatgcagccaacagatttggtattcatttgttgcttttgtgcttcttaacatattatgaagaatctatagaattattttatttatatttagaaaaacaaaaacacgaatttctctatgcgcagataatttttttttcctttttttttttttctttttttttgttgagacagagtctcgctctgtcgccaggctggagtgcagtggtgcaatctcggctcactgcgacctccacctcccaggttcaagcgatgctcctgcctcagcctcccgagtaggtgggattacaggcacatgccaacacgcctagctaatttttgtatttttattagagacggtgtttcaccatgttggccaggatggtctcgatctcttgacctcgtggtccacccgccttggcctcccaaactgttgggattacaggtgtgagccaccccacccggcctcttttccttttttaaatagaactaagacaagacttaggtagtatgcacagataatttctaaaaggatagataccaaactctttaacagtagctgctacttagttggagccagggaagagagataatcactttctaattccacatgaatctgtgtaggttttttttagtaagcctttattactttaaaagttatatacatataattatataattatatgtatataatttttaaaacatatatataatttaaaagactatcctacacaactaataaaactttcctccctctctactcaacttctagccatccaagtgaatgctagattacaaataattctgtgtacattttgataatattttatttgataagttcaaagcatagaacagagttcctttaaaagataacaatgcatttaaacctttttataaacactgtagtcttctcatgggcttctttctggaggatgaatggggagtaacccagggacaccactcctaagtgcttagactagaaatggtggggagtcagaaaagaactgtttatggtgaaataaaacaaagaaggctgggcgtggtggcttattcctgtaatcccagcactttgggaggccgaggtgggcggatgacctgaagtcaggagttcaaggccagcctgaccaacatagagaaaccgcatttctactaaaaatacaaaattagcttggggtgatggcgcatgcctggctgaggcgggtggatcacaaggtcaggatgcgccatcacgcccagttacccgggaggctgaggcaagagaatagcttgaacccgggaggcggaggttgcagtgagccgagatcacaccattgcactccagcctggacaacacgagggaaactccgtctcaaaaaaacaaacaaacaacaacaacaacaaaaacgtaaaacaaacaagatccctccaattaaaacccatgcctattaaagtgcatgggggcccaatgacctactgtttggcaaaacttgaaggtctaaaagctgttcatggtcaaagaaacaatttatagttgaggtgatggatatgataaatagcctgatttgatcaacctacaatgtatacttacatcaaaatatcacattgtaccccataaatatatacaattattacttttttaaaagattttttaaaactttttaaaaatacacacaaaaagcagtttgtggtctaatttctttttccttgctcagcctcatcttttagcacctgtttatacacatatcacctctattcttgtaacaaaaataggtagaactggccagacacagtggctcatgcctgtaatcccagcactttgggagaccaagatgggaggctcaatagtttgagcccaggaattcaagaccagccagggcaacacaccagaccctatccctactaaaaattaaaaattagccaggcatgctgcacaccagtagttctaggaacttaggaggctgaggcaggaggatcatttgagcccaggagttcaaggctgcaattagtgatgatcatgccactgtactcccacttaggtgacaaaacgagactttgtctaagtaaaaaaaaaaaaataggacgtcccagtaccccaatctatgtctctcctctccatctcccagtccatatttaagctgtgcctcaaatataccatgctgtctaatgcatccacacctttgcatgtgctagtccctcctctaacacacttccacattttccaacgcccttcatcttgtccctctagcaaccttctgtttattcttcaaaagaattatcttagatcccatggcatcatccctaatttgccccaggttttcttggacacttttgttacattcccattgttccactgtattctagcatatacaccaatttttttttctttttttcttttcttttttgagatagagtttcgttcttattgcctaggctagagtgcaatggcgtgatctcagctcaatgcaacctctgcctcccgggttcaagcgattctcctacctcagcctcccgagtagctgggattacaggcatgcgccaccacacctggctaattttgtatttttagtagagatgaggtttctccatgttgttaaggctggtctcgaactcgcgacctcaggtaatccgcccacctcggcctcccaaagtactgggattacaggcgtgagccaccgcacctggcatatacatgaatttttttgtttgtttggttggttgtttttttgttttgttttttttgagatagagtcttgctctgtcacccaggctggaatgcagtggcgctatctcgactcactgcaagcttcgcctcccaggttcacgccattctcctgcctcagcctcctgagtagctgggactacaggcgcccaccaccacgtccggctaattttttgtatttttagtagaaacggtttcactgtgttagccaggatggtctcaatctcctgacctcatgatccacccgcctcggcctctcaaagtgctgggattacaggcttgagccaccatgcctggcccatatacactagttttttactgtaggccgtaaggccctttgaaccctcgatatataatacttgctcaattatgtttgtttagtaaaggaatgattccatttgcaccataaactctcttcctgtgaccagcatatgaatgtgtgtgtggtctctaagaactcgaatgatgcctaagctatccaacccactttcctcagtttttatttacgcagaaattgaaattaacaaactaatttctgagtcttaagtgaaattgttttcgttttatttaaagttacccttgacttacatagttttaaccttctggaaagttcttcttttttctctctctcttcctgttcctgattgccacactggatagaaagttctaaatgaatacttaggtttgaaagtatttttctacatctatttattttgccattctacagatttggctccattgtcctaaggtttcagcacaataaaaatctcgtttctcccagtgcttgtcttgacatcaatgtagcattaaaaagtccaagacttttacagactaatttaagctgaacaaggaaatataatctggtacctactaagaaacataaatgggcctgggttgctagcagttcctggaagtcactgtgttttccaataaatccatgcaaatcgtaacagggaaagagaagccacaaagcagaggctgggactgttgggatcatgttagtaattaaactctctctcctcttgagactcagtgagagccttccccttacaaaaaaacaaaaaagaccatagcttgctgccaaagcggatctgaccacgcgtcctctcactctaagagattaaaataaagcctcctgcagtccttttctccaaatacacaaagaagtggctgggctgaggctcaagggcacagttccagtccctgttggcaagagaagggcagggctctggttctcccaaagggtgcaaaggacaagaatgtttcctagaaaagaaaccagggaaggagaccaaagtagacctagctgatatggagctgttatgtgaaaactgaaagctgcttcgatactacttcaaagccagattattctgggaactgaagggagactgagccttcaagtaatatgactagggaagtcaagtacaaaaaaaaaagtgagaccaggaaggaacaaagcatgcatttggagctaataccactcattggaagaggttgtttggaaaaggtttgcaaataccacaaaaatgggattcaaagtgtctttatgtattgtgatattcattgcagcactatttataatagcaaaaaactggtagcaactgaaacatctagcagtaggtgaactgttttatagccatggtctagaacattaaaccacaatttaaagttttctgtgcatatttaataacccaagaagatgttcataatataatattgagggtttttttgttgtttgtttgtttgtttgtttgagacggagtctcacactgtcacctgggctagagtgcaatggcatgatctcggctcactgcaacctccacctcccgattcctctgcctcagcttcaagcgattcctctgcctcagcctcccgagtagctgggactacagttgcatgccaccacgcccggctaattgtgtattttttagtagagatgcggtttcactatgttggccaggctggtctcaaactcctgatctcgtgatctgcctgcctcagcctcccaaagtgctaggattacaggcgtgagccaccgcgcccagccgtttttcaccctttatagttgttttttgtttgttttgttttttgtgtgtttgtttgtttgtttgtttttgagacagggtatcactctgtcactggagtgcagtggtgcagccttgactcactgcagcctctgcctcctgggctcaagtgatcctcagcctcccaagtagctgggactataggcatgctctaccacactagggtaatttttgtgtttttagtagagatgagttttgccatgttgcctaggctggtcttgaactctttgggctcaaatgatctgcccacttcagcctcctaaagtgctaggattgcaggcgtgagccaccatgccagccagtctctttttaagaccctcttcctgatcatttgagcccaggaagtcgaggccgcaatgagccatgcactccactgccactgcactctagcctggacaacagagatcctgtctcaaaaaaaattaatgtccttaaaaaacaaacaacagaccaggcacggtggctcatgcctgtaatcccagcactttgggagactgaggcaggttgatcacctgaggtcaggagttcgagactagcctggccaacatggtgaaaccccgtctctactaaaaatacaaaaattagccaggcctggcggcgggcgcctgtaatcccagctactcaggaggctgaggcaggagaatcgcttgaacccaggaggcggaggttgcagtgagttgagatcacaccattgcactccagcttgggcgacaagagtaaaactccatctaaaaaaaaagaaaaacccaaacaaaaagaacactagttgcctctgaagatggtgagcctctgaagatgcctctgaggctcaattttgagggaattctatatcctgttaaaagtccaaggtgcagcatgtaccagatggctgtatgccctcctctttctggggcagggttgacagtaataggcaggaatgtatcatatatatgtatcatatattttgtggttttcagcagtgggttttttttttcctttcttaatagaaattgatgctatttaatttttataccttttgttgttgtttttaatggggtttgagagaagagagtaaagtgaaaatgtcactagtcctttaattagaagtccatatttccaccgggcacggtggcttatgcctgtaatcccagcactttgggaggccaaggcgggcggatcacttgaggtcaggaatttgagagcagcctggccaacatggtgaaaccccatctctactaaaaatacaaattaactgggtgttgtggcgggcacctgtaatcccagctacttgggaggttgaggtgggagaatcgcttgaacctgggaggctgaggttgcagtgagttgagatagcgccactgcactccagcctgggccacaggagcaaaactttgtcagaaagaaagagagagagagagagagagagagagagagagaaagagagagagagagagagagaaagagagagagagaaagagagagagagagagagaaaactcggaagtagactttttttttcttttttttttttttagatggagtcttgctctgtcgcccaggctggagtgcagtggcgtgatcttggctcactgcaacctctgcctcccaggttcaagcaattcttctgcctctgcctcccaagtagctgggactacaggtgcctgccaccacacctggctaatttttgtatttttagtagagacggcattttgcgatatcggccaggctggtctcgaactcctgacctcctgatctgcccgcctcggcctcccaaagtgctgggattacaggtgtgagccacctcacctggcctcttttatttttatttttatttatttatttatttatttattttgagacaaagttttgctgctgttgcccaggctggagtgcaatggtgcaatctcagctcactgcaacctccgcctcccgggcccaagcgattctcctgcctcagcctccggagtagctaggattacaggcatgcaccaccatgcccagctaattttatttttagtagagatgggatttctccatgttggtcaggctggtctcgtactcctgacctcaggtgattgacctgccttggcttcccaaagtgctaggattaaaggtgtgagccaccacgtccagcctggaagtagacatttttttattaaccaaaatgaatttagttagctcaccattgcctctacaaaaattgtactgggaccaaaaactttgtatatgagacaacaaattttctaaaatgcaaatcttaaagacaaataatgttagtgtccagaagaaaggttattgggtcagtctttcagattatttccccataacaccaagttccaaaaaacaatttctagtcatttgtgggatgctccagagagcccttgggacaagtaaagttgcagctgtttgtgtgtgttgtaattcaagatgatgtgttgctacatctactagtttggtacaactgttatgatcagatagacctagttccttaaggctgagacacaacagtctggtttctgtaatggaaggatgagtaggctttattctgttttgttgctttttttctttctttcttttaaataatacattctaagcctcgatcctggactttgcaggaaaaaaaaaaaaaagaataatacattctaccctcacatatagtcaattgattttcaacaatggtgccaagacaattcatggggaaagaatactcttttcaacaaatggtgatggaacatccacatgcaaaataatgaagttgactttgggaggccgaggcaggaggatcatttgaacctagggagtttgagaacagccaaggcaacagagtgagaccctgtctctattcaaaaaaacaaaaagaaagaaagaaaaaagaatgaagctggactcctccctcacaccacacacaaaaattatctcaaaaaaaaatctaaatataaagactaaaactataaaattcttaaaagaaaatataggaatcttcttgagcttggatttgctgatgattttgatggcagcagcggcctgtttggagtggtggctactgccatgacaccagcattgaggggactggtgggggagtgggcatggctggggctgcacactccatggagccaacggaagccaagaacaggcgggagccctactcccttctgagttggcagggccagtgcagctgcagccaaccagctgtagctgtggacccaggcatccctgcactcttgactcaggaagccccctgcccccacaggctcaaaaatgcctgctcccactgcctggcctcttcctgttcctggtgcccgctccaattttggagcaaagttgaggctgagcccaggcactgtcgcaacctgccacagtgcacgcatgctcagggcagcactgatacaccagccccctgccaacttggccctctctgggctttgggcagagatgagcacaagtgggaggccgagggggtgctgagggcagctcaccatgggcctgcaggcaccccttggcacaaacagccttggtgccatggacacttggatggcagattgatggcagcaggaggcagacaggctcgtggactgaaaggggcaggtgcccgatgaagccccaccttcaagccagtgacagcctgaagcctgtgggctgggctgccagttccatggactggagtgagaacttatggtgctttttctggacctgcccatggcaaaccatggaccaattcagcactcatttcctcccctctgaagcccataaaaacctcagtctcagccagattcaggcagacaacaggaagacctgcctgctgttaggagctactcactccatgtctcttctccactaagggctgcagagatgatgggatgatttgcctgcgaataggagctacccactccaggtctcctgtctgctgagggctgcacagacattgggatgacctgcctgtggaagggagctactcactgcaggtctcttctcctctgacagctggatactcgttgggatgacctgcttgcagaaaggagctacccactttgggtctcctgagaatggttctgcctctcagtgaagctcctctctatcttgctcaccctctagttgtccgtgtacttcattcttcctggacagggaacaaaaactcaggacctgccaaatagcggctaaaagagctgtaatacagccggtcacagtggctcacacctgtaatcccagcactttgggaggctgaggtgggcagatcaggaggtcaggagtttgagaccagcctgaccaacatggtgaaacccccgtctctactaaaaatacaaaaattagctgggcatggtggcacatgcctgtaatctcagctgctcaggagtctgaggcaggagaattgcttgaacccaggaggcagaggttgcagtgagccaagatcatgctactgcacttcagcctgggcaacagagtgggactctatctcaaaaaaaaaaaaaaaaaagagctgtaatacaaatagggctgaaacatatccctctgcttgccacattcccagcaacaagaagaaaagaactgcagccctttggagagcccggcccaggctgttgcgttgcctgctgggctgagtgggcagaacaaacccagtgggtgcaagcaatactcaggcagaaggcatcactggccacagaggtttctagctggcgaagcaacaccccaaggatcctgtgacaatttattgaatatgacaccaaaacagtaatcaacaaaagaaaaaatagataaattggactttgtcaaaattaaaaacttttatgcatcaaaggacactatcaagagtgaaaagacaatctaaagaatgggagaaaatgtttacaagccacatagctcatcagggattgatattcagaatatataaagaagtcttacaacaaaaagacaaaaaatagggtgggcacagtggttcacacctgtaatcccaatactctggaggcagagagaataataatacattattattattgcttgaagccaggagtttgagacccgcctggaatttgagacagggatgatccctccacctcagtgcctcccaagtagctgagactacaagtgcgcaccaccatgcctggctaatttttttgtattttttgtagatatgaggtttcaccatgttgcccaggctggtctcgacctctgaggctcaagtgatctgcctgcctcagcctcccaaaatgctaggattataggtgtcagctaccaagtatggctcaaaaagtaatttaaaaattattaaaattgccactgtggccaggcatggtggctcatgcctgtaatcccagcactttgggaggccaaggccggcagatcacttgaagccaggagttcaagaccagcctggtcgacatggtgaaattccatctctactaaaaatacaaaaattagccgggtgtggtggtgcgcacctgtaatcccatctactcaagaggctgaggcgggagaatcacttgaacccgggaagcagaggttgcagtgaggcaagatcacaccactgcactgcagtctgggcaacagagtgacaccctgtctcaagagaaaaaagacaatccaattgaaaaacaggcgaaggacttgagtaggcatttctccaaagaaggtatcaaatgggccaaatggccccaaatcacatgaaaacatgttcaacatcataagtcattagtggaatgcaaatccaaaccacagtgagatgccactcacacctacataaattttttaaaggaaaaataaaagtgttcgtgtgaatgctgagatattggaaccctaatacattgctggtaggcaagaaaaatgatgcagccaccacagaaaacagttcggcggttcctcaaaaacttaaaaataaacaccaaatacaaatggtttgtgtctgtaaccccagctacttgggagactgaggcaggaggattatttgaggctagttcaagaccagcctcagcaacatagtgaaaccccatctctaaaaaaaataaaaattaaaaataaacatagaattaccacatgactagcaattctctttctaggtaaatgcctaaaagaattgaaaataataattcaaacaaaaacttgtatatgaatgttcatagcaacactattcacactagccaacaggtagaaacaaccaaaatgtttgtcactgatgagtggataaacaaaatgtagtatgttaatacaattagaatattatttagccataaaaaggaagaaaatactgattgatgctgtagcatggatgaacctggaaaacattatgctaagtgaaataaattagacacaaaaagctacataggattccatttatattaaatgcccagaagaagcaaatccatagaaacagagtatataagtgtttgccaggggttgggaggagggaaaaatggggtttattataatatggtttatttgggggggggggatgaaaatgttctagatttgataattgattgtggtaatggctgcacagctctgtgaacttactaaaaaattgaattgtacagtttcttttatttcattgagataggatctcgctcccaggctggagtgcagtggcttagtcacagctcatggcagcctcaaactcctgggctaaagtgatcctcctgcctcagcctacagagtagctgggactacaggcacacactaccatgcctggctaattatttttatttttagtagatatgaggtctcactatgttgtccagtctggtctcaaactcatgactgcaagcgatccttatgccttggcctcccaaattacagttgtgagccaccacaactggccaaattatacactttgttttattggtttttttttgtttgttttgtttaggtttttttttgttttttgttttcttaaacgaagtctcgctctgttgcccaggctggagtgcagtggcgtgatctcggctcaatgcaacctctgctttccggattcaagcaattctcctgctcagcctcccaagtagctgggactacagtgtgcaccaccacgcccagctaatttttgtatttttagtagaggcagggtttcaccatattggccaggatggtcttgatctcctgacctcatgatctgcccatctcggcctcccagagtgctgggattacaggtgtgagccaccacacccagcctgtaaatgttgactttttttttttttttttttttttttgagacagagtttcactcttgttgcccaggctggagtgcaatggcaaggtatcagctcactgcaacctctgcctcctgagttcaagcgattctcctgcctcagcctcccgagtagctgggattacaggtgcccccaccaccactcctggctgattttttttttttttttttttttgagacagtctcattctgttgcccaggctggagtgcaatggcgtgatcttggctcactgcaacctctgcttcctgggtttaagcaattattctgcctcagcctcccaagtagctgggattacaggtgcctgctatcacacccagctaatttttatatttttagtagagatggggtcatgttggccaggctggtcttgaactcctgacctcaagtgatccatccgcctcagcctcccaaagtgctgggattacaggcatgagtctctgggtatggccttaatcttttgtatttttagtagagacgaggtttcaccatgttggccaggctggtctcgaactcctgacctcaggtgatccacccacctcggcctcccaaagttctgagattacaggtgtgaaccaccacacatggcctatataaattgactcttaataccagaaacagattagctgctctagaaaataactgcctagctctttgaaatgcctcacctagaatgtcctcacaaggagttttgtgtatgccatgtaacctttaagtcaaactagtcttcccaaacacatcgtcattattattattattattattattattattattattattattattattattttgagacagagtctcactcttgcccaggctggagtgcagtggcgtgatctcagctcactgcaggttactcactgcaacctctgcctccctggttcaagtgattctcctgcctcagcctcccaagtagctgggattacaggtgcccaccaccacgtctggctaatgggggtttcaccgtgttggccaggctggtctggaactcctgacctcaggtgacccgccctcctctgcctcccaaagtgctgggattacaggcgtgagccaccgcgcctggctactttccatattattgaaatgtgatgtagtcattttcacatgacaatgtgaataaagagacaaacttagttttataatgtttcacatcaatttatataatgcttatagtccttctaagagggtaaaggcctttgtgaggaatcagccaactggctgcagagtagtggtattatttttttctgtatgagaagggaagtgacactgtgtcattgtgaggtaacagaaagggatttggagaagaacacctaggaataaagggaatagtgttaccttaagactaacacttagggatatatggtaaggtaactaacggtgaccttaagggtgctgattaggtcacattcataaatgggtggggagtgatgccaaagggcacatagtgagcaagttgtggtcacgaggtgattaggacagatgatttagggctggagactcctgtgggtgttaacatgatgactgcataggtgctcaagactgcccatggtggagtattagtccccacaacctaactggcatcaagaatcagggaaaccagaccaggcgcggtggctcatgcctgtaatcccagcactttgggaggctgaggtgggcagatcatgaggtgaggagttcgagaccaacctggccaacatagtgaaacccctctctactaaaaatacaaaaattagctgggaatcgtggcacgtgcctgtagtcccagctacttgggaggctgaggcaggagaatcgcttgaacccaggaggcagaggttgcaatgagccaagatcgcaccactgcactcgtagcatgggcaacagagcgagactccgtattaaaaaaaaaaaaatcaaggaaactttcttagaaacagctgggtcttaatagtctcaacaagttaaggagagtttctgggcttcagaccccgcatttccccccatgccctgaagagcattatagaccctgtactttaagaagagtaaaagtcctgagtatcctgttaggaatcatcccatccctgggcagcttctcctcagtactaaccatgaggaaggggaactgagggccctttcacccagagaggactcttcatcctgaagagaagtgagaggacatgtctgaaaaacacaccaagataaagtatctggctgtcatgactctttctagaaaaatctcagtgctgttttacataacctcattcatctccagaattagaatgagtatcttctggcctggtgtggtggctcacacctgtaatcccggcactttgggaggctgaggcaggcggatcacctgaagtcagtggttcaagagcagcctggccaacatggtgaaaacccatctctacaaaaatacaaaaattagccctgcatgatgggggaggctaaggcggaagaatcgcttgaacctgagagagggagcttgcagtgagccgagatcgcgccattgcactccagactgggcaacagagcgagactccatctcaaaaaaaaaaaaaaaaaaaagaatgaatatcttctattacttcatttattgtgccaggtactcttactcttgggcaactgaaatcatggcttcatatctatgaattgagtgaggtggtactcacatcaccagcctcttatgttgaccgaatcaagacctttaactgcctagtagactgacttacaagtggagctgctcaacagataatagtttctttttttttctagacgggagtctcgctctgttgcccaaggtggagtgcagtggcgctatctcggctcactgcaagctccgcgtcccaggttcatgccattctcctgcctcagcctcctgagtagctgggaatacaggcgcccgccaccatgcccagctaattttttttgtatttttagtagagacggggtttcaccgtgttagccaggatggtctcgatctcctgacctcgtgatttgcctgcctcagcctcccaaagtgctgggattacaggcgtgagccaccacgccttgctctttttttttgggggggggggggttgtcgtggaaattaagtttatgaatctccttgatctctgaattattccaaacagcaccatcccagcaattccttttaattgtttttagaactacagttgacctttgaacaatgagagggttagggtgccaactcccaccaatgcagctgaaaatctacataaaagattagattccccaaaccactagtagcctattgaccagaagccttcttgataacctaaacaattaacacatattttgtatctttatcatatactgtatttttacaataaagtaagctagagaaaagaaatgttattaagaaaatcataaggaagagtaagtgtatttactattcatgaagtggaaatggatcatcatgaaggtcttcatccctgtcttcacattgagtaggctatcttgctgtctcaggggtggcagaggcggaagaggtggaggaagtggatggggaggcggaagaggtggaggaagtggatgggaaggcgggagaggcaggcacacttggtgtaacttttgttgaaaaaatatctttgtataagtggacccacgcagttcaaacgtgttgttcaagggtcaactgtggtcatattgtcggggttctttagccattaggtctcagaaattagcctgaatttagccagacatagtagcacacgcctatagttccagctgcttgagaggctgaggcgggaagatcacttgaacccagactgcagtgggctatgatggtgtcactgcactccagcctgggtaacacagtgagactccatatcaaaaaaaagaaaaaaagaaaaaaaaaagaaaaggaaagaaattaacccgaatttgtggtttctaacttggcaattagtctttctttgaccccaagtttagactcaatatcttcactaagagccagcccagggggtgcaacttggagcaccagaatgtttgtgtaatactagccatggtaaagaaggtgtcccaggctctcctggtggaggcaggctctgctctacttaactctactccaggcaagagcagacaaagagcagactctttagactggtaagcagaacagactcgtccctcaaggagctcccagaccagggaggggaggagactgtaaatattcaccatgccgtggtaacagcagagatggagcacaaggggaagttcagagaaagatctcagaagagaggtactttgtctaacctgagatttagggaaagttctcctgaagatgatgactggtctacatgacctgagccgagatgggaatgagttgaaaggtaggcttgtgaagaagcaggagaagagcattatagatagaaaactcaaaggcatcagaggccccaagctgcatgctatgatattgggataatagtagtacaaacatagtgcaagacagtggtgtaaagtgagatatttgcttctgagccatttcccttctgttgccacttcctcttcctcttttaagtgaaacattactagcagcctaataattatcatagctgacatatattaggtgttttttgttttgttttgtttgttttgtttttcttgagatgaagtctcgctcttgttgcccagactggactgcaatggtgccatcttggttcactgcaacctctgccccctgggttcaagcgattctcctaccttagcctcctgagtagctgggattacaggcgcctgccaccatgcctgactagttttttgtatttttagtagagatggggtttcaccatgttggccaggctggtctcgaactcctgacctcaagtgatccacccacctcagcctcccaaagtgctgaaattacaggcatgagccactgcgcctggcgtttttttgttgttcttgttatttgtttttttagatgggagtcttgttctgtcgcccaggctggagtgcagtggcgcaatttcggctcactgtagcctctgcctccaggattcaagcaattctcctgcctcagcctcctgagtagctgggactacaggcgcgtgccaccacgcctggctatttttttgtatttttagtagagacagggttttaccatgttggccaagatggtcttgatctcctgacctaatgatctgcccgcctcagcctcccaaagtgctgggattacatgcgtaagcaaccatgcccagccaggtttttactctgtccaactctattctacatcccttaaatttattaacttgttaaattctctaggagtaaatgctgtcattactcccattttacagatgaggaaactgagtcgggggagattaagtaacttctcaaaggtacacatagggccatgtggtctgtcatctctgctttagctgacacatatggcctctatagcctaggctttacatggccagtctccatccagactgactagagtggtgttttgtaaaatatagaggttgatctgcagcctaggtgcaatagaattacctggggcaggccaggcactgtggctcatgcctgcaatcccagcactttgggaggctgaggcaggtggatcatctgcagtcaggagttcgagaccagcctggccaacatggtgaaaccccgtctctactaaaaatacaaaaaaaattagctgggtgtgttggcatgtgccggtaatcccagctactcgggaggctgaggtaggagaattgcttaaatccaggaggctagggttgcagtgagcctagatcacccactgcactccagcctggtaacacagcgagactccgtctcaaaaaaaaaaaaaaaaaattagaattacctggggcatttgataaaacacagatacctaggctccactgtactctgcatgaatctaatggggtgggtgattaagaacctgaatttttttttttgaactccccagatgatcctaaggcacagtaatgtttgggaacctctgggctggagtctctgggttgaaatccaagttttgttctgttttttttaagaatgagtcattgcatctttcaagtattcaaccaagattgtcttcataatcttacacttcattcatctgtctttacaaagttacagagctgaagccatatcctgtttcttcagcactcatctatactttaaaaattctaggccaggcatggtgggtcacgcctgtaatctcagcactttgggaggccgaggcgggcagatcacctgaggtcaggagttcgagaccagcctgcccaacatctgcgaaatgctgtctctactaaaaatacaaaaaattagctgggcatggtggtgggcacctgtaatcccagctactcaggaggctgaggcaggagaattgcttgaacccaggaggcggaggttgcagtgagccgagcttgcaccactgcactccagcctgggtgacaagagcgaaactccatgtcaaaaaaaaaaaaaattctaatcagatgccagtctcactgtcattctccaatcttcccactataacatatttagttcattgtcctgcccgtgttctaattttgcagttttcctagactgatcctctgtgatccaacaattaattataaattattaattataaattaattaattataaattaataaaaattgtgatcccacaattaatttcaaatttattaaatagaacctgagaaaaaattatgcagtatttttttcattagatgattgtcagcctcctaccaacaagcatatgctagatgttacccatgaaaacttaagtagtcaggccaggcacagtggctcacgcctgtaatcccagcactttaggagattgaggtaggcggatcacctgaggctaggagtttgagaccagcctggccgacatggtgaaaccccatctctactaaaaatacaaaaattagccgggtgtggtggcgggcacctgtaatcccagctactcgggaggctgaggagaatcacttgaacccgggaggcagaggttgcagtgagccgagatcgcgcaactgcattccagcctgtgcgacagagcgagactgtctcaaaaaaaaaaaaagagaaaaggaaaagtagtcatgatccctcccttggactcatttccagtgtaaaggttattaacctttttgtaattgggatgtattatgaatgactgctcaattcaacaatgtacctttttcctcagtaattcctaaagaagtcatagaatgtatgtatttctttattgaataaagtctattaaaattattgtgattctaaggcatcttagggaatttcattatgtctcctaaagctagactcaaaaatagaattaggaattattcttctttagcaaccttcattatgtctcttaaagctagactcaaaaatataattaggaattattcttctgtagcaacctcaagcagtccaggatcagtcctcagctccaccttttgtgacagtgggcaggcacattcatgctctgaccctcaggcttctcttcatcaaataggagccttgtgttagattatctctgaggttttttcacaactagcattttgtggttcaataaacagaataattgtcctgcaaataggtacgtaccctaaatagggttacagataaaatacaaagtgcctaactaaattttagtttcagataaacaataattttttaatgttaagtgtgtcccaaatttcacatagaacactttttttttttttgagatggagttttgctctgtcgcccatgctggagtgcagtggtgcaatcttggcttaccgcaacctccacctcctgggttcaagcaattcttctgcctcagcctcctgagtagctgggactacaggcgcacaccaccacacccagctaatttttgtatttttagtagagatggggtttcaccatattggccaggctggtctcaaactcctgacctcatggtctgcccgcctcagcctcccaaagtgctgggattacaggcgtgaaccactgtgcccggccagaacataattatactaaaaaattattcacttgtttatctgaaattcaaattttattttattttattttcattattttttgagacatagtttcctctgtctcccaggctggtttcaaactcctggcctcaagcaatcttcccaccttggcccccgcaaagcactgtgattataagtatgagcctccatccatgcccagcttaaaatcaaattttaactggcatctgctattggcaaccctaaccccaaagccattgctttttatcccattttgtgaaagtcagtgtcactatttccctactgtgagcttgcttatttctgccttttatccttagcctgaaacaagttgtgaatatcaaatttccactcactccattgctttacctatgaaataaattcccagaacttagaatagttaacagcaatctgtttcctagaactagctgccaggactacacctggacatctgttatttacagcctcattattgacattttgtcaatagttctgacctatgccatgtaatctgttatagtcatagcatgccttcctggaaattttcatttgcctctattcctattgtattatttgggttctttccatatttgtttgttcaagattctctcatcattaaaaacaaataaacaaaaacctctacttaaccctcctcatcccattactgctctacttctcttccttcataaccaagtattatctacatgcattgtcttcacatcctgttattaattccccaatgcattaaattctggctcatcgtcctactacttctcgctgccattgaagctcctctttccagagtcactggttacttcctatttgtgaaatcagtaggaagcttttcagtcccagtcctactggacctctcagcagctctggccaatgctgaccactcccccaatccagaaaccactcttggcttctgtaacagtccctggctccagctgtcctcctacctccttacttccctggccacttgggtcggtcaccttcagccattcttgtcatctgcctggtcctctatgattctcagtgttcgatgcacactctgtagttgtgattgaggtatttacaaaaaactggtgccccactgagccaggttcacgtggaagttgggatgaaacaggattctgagaggacatgggaggaacatgggtttcactttgtttctttattaatctttgaaatgtgtttgtttattcatttagcactcattttttgagcatatactatatctcaaatatcaggtcctaggagtacaaaatggcaagtcaagtccttgccctcaaggagcttgcagtctaggaaaagccaacaaaccaactaatgatgtgaggacagcacacaaaggtaccatggactcagatgcaggagccaggaaagacactagagacaggttgcctgtgatctgagctttaagagacaagtaggaattagccaggtgcattccatatgagttcttccagatagctggagtccacatgcctgagggaatatgacagaagatcaagtgagggagccaggcaaatgccagatcacaaagaccatgtgtcaggtgaaggttatggaattgaaatgtcttaaaactataaggagctttgaagtacgtcaaaatgggcaataaattgatctgattttcattttagaaagacttcttttgacaacactgtggaaagcagcttgggaagggggctccagacttggtgcagtggaaccaataggtatggtcacgtgagaaatcagagtcagaaaaaaaagcagtggcaggggaaattgagaggagatagtttctagtgctgctacagaggtagctattctaaggcttgatgaccaattggttgtcaaagataagagggaggaaaaaaaacaaagggtctcccagatgtgtgcatttagtgactgcataatgcatcacctccactaaatgattcatctgttcttcatccctgttagtctggacaccaaaaatatcactctgcctaaaggggggaaacatttctttgagggaaaacccttttgccctatagctaaactaagccattggaaactttttagggcagaaatgtcagaggcatgaacagggcttctggaggagggtgaggtctccaggttctcctggctagtgaagaggctcatgttctcattagcaaactgatggcctccatcgatggccgtgatactcacagggcgtggttcaaagccccagatcatcagggcttctagagtctacttaatcaggacaggcatttatttaaagtgctctgaagctaactgtcacaaatagggaaccttagtactggtcagttgggaaccaaggttattaccaagaagatagtgtcaggtgtcaagtgtggaagtcaggacaaggccagatgtaggagataagagtgaaaccagacgtgagaaggttggagcgtgtaaaggaaatgggtcacaggacaagcagttcagacctgaggccaagaagaggaaggcaagagttctcttgcggatctcagctagaaaacattgctgtagaacataggtcactttgtttgtttgtttatttatttatttattttaagcaaaagcaagtttattaaggaagtaaaggaggccgggtgcggtgactcacacctgtaatcccagcactttgggaggccgaggcgggtggatcacctgaggtcaggagttcgagatcagcctggccaacatggtgaaacctcgtctctactaaaaatactaaaattagccgggcgtggtggcagccacctgtaatctcagctacttgggaggctgaggcaggagaatcgcttgaacccgggaggcagaggttgcattgagctgagatagccccatggcactctagcctgggggacaagagcaagactacgtctcaaaaaaaaaaagaaagtaaagggataggccgggcactatggctcactcctgtaatatcagcgttttaggaggccgaggggggcggatcacctaaggtcaggagtttgagaccagcctggccaacatggcaaaaccccgtctctactaaatatacaaaaattagccgagtgtggtggcttgcgcctgtaatcctagctactcaggaggctggggcaggagaatggctggaacccgggaggcagaggctgcagtgagctgagatcacaccactgcaccccagcctgggcaacagagcaagactccgtctcaaaaaaaaaaaaagaaaagaaagaaagtaaaggaataaagaatggctgttccaccggccagcaaagtgggatgctccactaaggacacttacagtcattttctgattatactctaaacaagggctggcttattgagttttctgggaaagaggtgggcaattcccagaactgagggttcctcccattttagaccatagagcgtaacttcctgacgttgctatggcatttgtaaactgtcagtggcactggtgggagtgtcttttagcatgctgatgcattataattagcgtataatgagcaatgagaaccaccagaggtcactttcattgccatcttggttttggtgggattttggtgggatttttattgcaggttgttttatcagtaaggtctttatgacgtgtattttgtgctgacctcctatctcatcctataagtaagaatgctaacctcctgggaatgcaacccagtaggtctctgccttattttagccagcccctattcaagatggaattgctgtggttcaaatgcctctgacatatttcaccccttccttttataagagaacccttaatcctaagggctgtagagggatgaagatccatcttctgtgacttcttcaggctgaataggggcaatgatattactgcctattagggtctcttgtatttggggtagagaggagctctgtcagaaagtgtcagtatggaggctgggtgcagtggcttacacctataatcccagtgctttgggaggccaaggcaggcagatcacttgacatcaggagctcaagaccagcctgggcaacatggtgaaaccctgtctctactacaaatataaaaattagccaggtgtggtggtgggtgcctgtaatcacagctactcaagaggctgcggcaggagaatcatttgaacccaggaggtggagtttgcagtgagccgagatcaggccactgcactccagtctgggtgacagagtgagactctgtctcaaaaaaagagaaagaaagcgtcattatggtgagggccatttataactctgacaaaaggtgatatctgaaagattaataagtgttcaatttaagaaaacattcagtaagcttatcctgcattcctacacaaagagtacaacagcaacacattccacaatggtaaagcaaaataagtaaaattattcaaagtaaactaaataagaagtctttccatgaactgggcaattgttgaaaccaagttgatatggggtcactagcttattccaatatgtgcccagaattagaatattgatccagatttttacattatctatccctcttgtttcttctaagtagcagccagagatcactggttggttctcaggaataagcagtcagtttaaattgcagaaaaaaaacttaaaaactactgataagactagactctggccgggtgtggtggctcacacctataatcccagcactttgggaggccaaggcgggtggatcacctgaggtcaagagtttgagaccagcctagccaacatggcgaaactctgtctctatgaaaagtacaaaaattaactgggcaggcgtggtggcgggcacctgtaatcccagatactcaggaggctgaggcaggagaatcacttgaacctgggaggtggaggttgcagtaaggcacaattgtgccactgcactccagcctgggtgacaagagtgagactccatctcaaaaaataaaataaaataaaatgactagactctgataacatgcgtaccatagtttttgaaacataacgtttttctctccagtctcccatttttactaaagacaaatcatggtaactgatttgctttgttatacttggcctcattatttgtataaagtgcagcaacaataattatttttcacataggcttttaaaatcagctttgatggaattttgttccttagaaggaatctcagataagacttttttaaagctgagcccagccatgggtctgtaccctcaaatatctatatgagttgggtaaatttctctcttcttgagatcccaagataacttggggctcctggacttgtcataaagtgacattctttacttaccacaggtcaagaaccctgtacagggactacgtagacaatgtatgaggccagttttcctaaggggcttttattggcactgtaagtcaagtttgattccttaaaggaaagagtgtcattccagtcaaagccttggtgaaaaaaaagtttctccaattgtgttctgatacaaaagaaaacattcttattgcatttatgcaaataattatattgccataagttaaaaatgctcacaaatggtttctgaattttggagaaattgggcagagagaaacaaatatgcttcaaattttgttcacaggagtatactttactcaattgttaaaagctgttaatagctcaaaagaaaaatttccttggctctgaaaaacaaaagaaaggatcagcaacgttttaagccaaaagttaaaaaaagattgcttcagtcttctgttaggtcaatccatgcagttaactcctgttttgcttgatattcatgaacatttcagctcttcatgagtcctgaaagttttttcctctattttaatgtcacaatttacaaagttattagaaacctacattcaataacacctgttagagttctataattgattataaaaccaccttctaaagaggacaaagacaagacaacaattgtccgtgggtgacaaaacaccttaggatagcctctattaaagccacagttgactaagaattttggttacttctgtggcatacaacaatttttacataacaattataatgattaacaacatacactaagtcatatcagaattgtaggagtttcctgtgattttggaacatataccaataacatatttatacaaatacagcccaaagaaagccaagcgccatttcatatttgacagtgcttcctgtatgatttttataccaaacaagccaaacttcaccattgaattagtgcattattgatgtcaaactcaattctttttttttttttttgagacagaatctcactcttttgctcaggctggaatgcagtgacgtgatcccagctcaccgcaacctctgcctcccaggttcaagcaattcttctgcctcagtctaccgagtaactgggattacaagtgtgagccaccacgcctggctaatttttgtatttttagtagaaacagggtttcgccatgttggccaggcacagggacctcaacagcacatgccagtgaggatgggtctcaaactcctgaactcaggtgatccacctgccttggcctcccaaagtgctgggattacaagcatgagccactgtgcccaggatcaaacccgattcttaataaaactttatagataaatctatccaattttaatgtctgaccataaggtaaggttcttataaacctcttaaaaccctttacaatttttgttaaagagcagattagtgttctaagaaaactctgttgtgcttttattccagtcttcaatttatggataaactgaataatacccctttaattttagctaatatgttcacacacagaatttcttttacaagattaatttttcacaaaccttccacaacttgttcaaacttcaactttttcctatctaacctaaaacaatcctttaacccttaaatctaggcaaaaaaaaaaaatccacattcacatgcctttttataatcttttaccaaaaacacatttcactttccttgcatgtaaaactgatttacttaagtctcatgaactaaaaggcatttatactttttacttttctgacaatatttgatttaagcacctattatttttaaaccagttaatcaaaatgctttcatatcacacacacaacccatataaatacacagacaggcagaataatattcagtagttgttaagatttttcatttgccagtttcttaaatggattatgggtttcagggtagagcgcttggaggaacaggcccaggaaagcacacagtttctagggcatcataagcaggtacagccaaagttggccaattggtgctgcagtctatttcctttgggccagagtttcctcagtattgtcccttcagggttcacctggaagatgttaccgggaaggagtcccaatccagaccccaagagggagttcttggatcttgcccaagaaagaattcaaggcaaatccaaagagtaaagtgaaagcaagtttattaagtaaaggaaacaaaagaatggcaactccataggcagagcagccggtcactttaaattcatttctacaacctaatttttgacatattttagatgccagttcatttactgtaaggcataagattagacttgttggcatcaaaggactgtgacttctaaatgaatgcatataataaagagatattttgcctgcaaggccaatgagacccacttaggatggtcttaggctcagcattatccttgaacagatttatgcatatttctaacttttaaattttcatttacatttgtttattttattatacttcccaagagaagattttctatagaagttttattaaattcttcctattgtacctaaactctgtccccattgtccttctcttgctccagattgtcatatctcagactgatgtgtctatcagaggcacagggacctcaacagcacacgccagtgagtcagtcatcagattatagtagcctgggaatggggtgaatacaggcttgaagtggactagtatctatttccaaggaggcccaatctattgggtaagccattgcagcaagtgtttctagctaacaagatggtcagagtcaggcaggggggccttgctgtgattctgggttgaccttgtttggagctagatgactatagccagcatctaggagagaaaactggttcaagtcactaggcttggaaatgtcatcttgccagaccctcttatggtcttgactaactgggctgggtttattaccagtagaggaacagacaactacatcagggcagaagcccaggcacatggacatggaaaaacatatgcatcactgaggaagagcctagagcttgatgtacacacagatgcttgaggttcaccctggtccattggatactgggtctaaaatatgttttcacattggtaattctaggccttatctgctcctgggggcagaggtcccaccaaatggtgcctgcatgggtccatactgactgtacttgagagaggctaagggtcctataagactggagaaagagggttgatggaaatagattagccttgattgcctggagaatgccagctggttttcagcccccaatactttggagcagaattagttaactttgagtgatgggtggatctttcttttcttctaatttaacttgctgttcatgtttagcttacatacagtattgggtcattttttgcataacttttttttatttctaacagactttattttttagagcagttttaagttcacagcaaaattgagcagaagttatagcccttgccccacgcatgcacagcctctctggttatcagcatccccaacccaaatggtacatttgttacacttgattagcccacattgattgacacatagttatcacctggaatccataatttacattaggcattagggttcactcagtgttttttttgttttgttttgttttgtttgagatagagtctcgctctgtcacccaggctggagtgcagtggcacgatcttggctcactgcaacctctatctcccgggttcaaccaattctctgcctcagcctcctgagtagctgggattacagatgcctgccactacgcctggctaatttttgtagttttagtagagatggggtttcactatcttggccaggctggtcttgaactcctgaccttgtgatccacccaccttggcctcccaaggtgctgggattacaggcatgagccaccatgcctggctcactaggtgtttttaaaaggaaaaaaaatctcacttactttgagaagactcttgtgctttcacatgtataaatataagcactaaaatcacatgaacatacattcatttgaagttttcaaggaaataatcatgaaatgtttcagattattatttaagtaaaaaatttttctaggaatgcatggacccctgagaatttagccacagactctcagggatttgtggacctcaattggaaaacattgctgtagaacagtagttcattttgaactcatttttgcaagctaaattttgacatgttttagatgctaattctaggaatgttctcccttttctaagaaaagtccaagcattttttacctgctctaaaagaatatcaacggcttttatgtttcagagactggatgcaagagattgtttaacaaatcccatcccatccctgagaatgtgtctaggcatttgctctttgcaaagccagatgcaacattcataataactaaggctatcttctggccagcactgcaagtgtatcttttgtctacattcttaagtaaccacatcaaatagcatcaacccacttggaaataattttgaagtgatttggatctctcttgtatattttccctataaatccctagcctggtaggcgtgtatattttctgctgcaatatttaatgcttagttccttgcctacatctaagaaatattaattttagaaggaattggatactgatattggcaaatttttatgagactggctaaaggagaaagaagaaggggacctgtgatagaatcttccatgacaaggaggaaatactggcctcagtctcctgcagaagcaggagctctggtacacaggtggggtgcccactggtacagctcccatctgacatgaagcaggcaagccaaaggggagcaagagcaatgcaacctgtaagacccatcctcagacattctgctattgcccccagacaatggaaggggggcgacagctgtccatgggggcactgctaagagggtgttgatcagcagatcaggactgtaactcaccatagtggtggactgccctgatctggagaccactgcctttcgagaataattcaccctacagaagctatctgagcatcaccagacagggtcttcctgggaattagcacatatcccaaatttccttcagctttgcctgcccacagtcccctgaaagccctccctttttctgggtgtgagaggaatggctgggcatcccttggcttatcctccttcttgcccaccatagccagcatctcagagtgaacatgcacgagggaggtagaaagactccatatccttgttctttacaacttagaaaagcctaagttataggagagagatagcacaatggaatgctgaattagaggtaaataattggtctgtttttttttcaccagtctagttactactattatgtaaaatatctaattttacataccctaaacacccatacccaaacaccttgacaaaggaatcattttacctcccaaacatagtcagtgttgatttcacaaaatatccctagaattactctttctgaggctaacaggactacttagatggttcctaaagtcccttctaactcctgcattctctggttaatgaatcagcattagtcatgtggaaggaaggtatcctcctcaaactctttttaagaatgatctcaaggaatccagagtgctcattaagttggtgaaagagtcagtgcagaatgcagctcatacatatatcctgatgtgatgttggcacctctcaagaagctgggaaagatgtccaggctggtcataggactcagcccctattatgggtccagcagccagtaatagtaagcaatgtctacttcaaaagatatctctggccaggtgcagtggctcaatcccagcactttgggaagctgaagcgggagcatcacttgagcccaggagtacaagaccagcctgggcaacatggcgagaccccatgtctaccaaaaaagaatttttttttttttttagacagattctcactctgttgcccaggttggagtgcaatggcatgatcttggctcactgcaacttctgcctcctgggtttaagcgattctcctgcctcagcctcccgagtagctgggattacagtcacacatcaccatgcccagctaatttttgtatttttagtagaggtgggatttcaccatgttggccaggatggtgtctaacttctgacctcaggtgatctgccagtctcagcctcccaaagtgctgggattacaggcgtgagccactgtgcctggccaaaacaattgttttaattagctggccgtggttgtgcatgcctgtagtcccagctactcaagaggctgaggaaggaggattgcctgatcctaggaggttgaggctgcagtgagctgtgtttgcaccactgcactccagcctggatgacagagcaagaccctatttcaaaaaaaaaaagatatttctgaggagccatgctcattcaagactcactgctcttagaagaggtgttaatctggccaggtgccgtggctcacacctgtaatctgagcactttgggagggtgaggtgggaggatcatctgagacctggagttcaaggtcagcctaagcaacagactgagaccctgtctcttaaaaaaaataagagagagatgttaatctatattaaacaattgaatagtgtgaagattttgtaaaactttttaaatcaccgattatacaaaagctcttattgaattattaaggagttagcaattactattaatgctgttgaatatgagtaagaacccacttaacttcaatcagaatccatcgatcaagcttaaagccttatctcatagttcccttcctggtctgtcagcattgcctcatagagagggaaatacatcccgcatctgcctcatcatgaacttgggtggccaccaggatattgctcatgaaagctgcttttctttctttttttttgttttgagacggagtttcactcttgttgcccaggttggagtgcaacggtgcgatctcggctcactgcaacctccgcttcccaggttcaagcgattctcctgcctcagcctcctgagtagccgggattacaggcgcccgccaccacacccaggtaattttttgcatttttagtagagacgtagtctcaccatgttggccaggctggtcttgaactcctgacctcaggtgatctacccgccttggcctcccaaagtgctgggattacaggcatcagccactgcgcctagcccgaaagttgcttttataaacaggttcaaggccgggaaatccattctcctccacctcccaaagtgctgggattacagatgtgagccaccgcacccagccagttcatagtttaaaacaaagatgatagcagccccttctcaaaacaaatctccttcttgcctggggactagactgcctttgtaggactaacgaattaggcacaaaattaaacattatattttaggagtcatgcagctgggggctacaagattctgaccctccctaaactgctcctaagatcagtgcttgagatattttgcaggcctgcacttgatggatcagctgacaccacccagatcaattaactggctcatctgatcttgtggcccccacccaggaactgacttagcacacgaggacagcttcaattccctatgatttcatctcctacttaaccaatcagcactcctcactaactggcttcccccaacctaccaagttgtccttaaaaactctgattccagaatgctacgggagactgatttgagtaataataatactccggtctccattacagctggctctgcatgaattaattacagccggctctgcatgaattaattactctttctctattgcaattcccgtgtattgataaatcgactctgtctaggcagcaggcaaggtgaacccactgggtggttacaacattagatagcaaattggcaattaaagaatatatctgtagagacaggatcttactaatgttgcccagctggtcttaaactcctggcctcaagcagccctcccaccacctcagcctcccaaaaggctgagattacaggggtgagacaccacacctggccaaattggcaatttttgaagaaagatttctcacaaggactttgcaagctttatgtactttatttgttgcaataatatgaaatgcatctttctgggaaggagaacacaggtaactgatttcagtgtaatacctagcactcatgccttgctaatcctttttatatcctatgagaaaggaaaaatccaggccgggcgcggtggctcaagcctgtaatcccagcactttgggaggccaaggcaggtggatcacgaggtcaggagttcaagaccagcctggccaagatggtgaaaccccatttctactaaaactacaaaaattagccaggcgcggtggcaggtgcctgtaatcccagctactggggatgctgaagcaggagaatcacctgaacccgggcggcagaggttgcgccactgctctccagcctgggcgacagagtgaggctctgtctccaaaaaaaaaaaaatccattttatggttagatttgggggcttcaagccgtatgtggaaaaggctctcttagggcatttggtctgtctgggctcctaagctgcttagaaatgaggtccttatcacagcagatacttaataaaagtgcactgatctttatatacctcttttttcagtcctttttctttttctcagatcgccttttccttctcttacttatcttttcccctatttcttttctctgcgtatggcttaggttagtccttggcggtgcagagacaccccccagaagttgttggaccctgctgcaacctccctgcagcttagacttcatttcttcacactcctgtatttggagcagcgacgctagtgccaggccctcagaccaggagacagttgctgcctcccacagtggcccttggggggcgatattggcagtcccaggttaggcttccacgtccttggctagccttaaggttagctctgaactctactgacctttgctcgctttggatgacaaaggaaatgatcgagtttagagatgggccagaggtgggtggaggggtggctgaaccttccggcttgcgctgtacaagccacaagaccaaataagggcgtgtgagccgcctccgtctgtattaaagttcagagtgcagtgtgcaaaagtgggactcggttttcagagataagctgttacccaaccctgcttgagttccagcagcggaggctgcgaagtctcctgctctgagcagggctgggtctgggggagaaagacctgggcccctgggcttgcttagctggggagaggaaagaaggggggcttccctcaccagcacctggtgactgaacggacccacaaccccacagattttcacaaagggtttccatgactctcccgactaaaatgtgccggccagtgtgactcattagaatgtgtaggaaaggtcactgtttgaggatattcagccagtgggggaaaaaaccacaacgttattttaatgaacgcttttagcctggcttgtttcctgaacattaaggtctagggcgggacttcgagtttggggccttttccagaggtattaacactgtgtttgctaaatacaccccagggaaggagtcgtcgggcttctacgagtcacacttaaaagactggcaagagttggcttcttctgttgtgttcttagcttccaaaatagtagtctctcctcagagccagacgcgcaatgccatcatgttaatgaggtgcctcatgtgcttcaatagccactgactgatggtaccccgaacctgcctggattcctcacctcttcccctgcccatctctccttcccgcagcaaactgctcatcctgcagcagtccgaacctctgcctcattggccctaagcttcctaagggaagggaccatgacttgtattcatgtttatatccctaaaactcagccctctgtttggcacatagtgtgtgcttagtccagatcacttaaatgtacaatgatttcattctctcggagccccgctctggtggtgtgggtccctggggacccctccagatgcctttctccagccatggctgcgcaggcaccgagaagccgcaggctggttccagctcacagcctctcgcctcaggcccacactgctcctcctgctgtctgccccagggcttgcgattgcccgggggtccccaagcgggctcaactctgaaagattagagagctaacagcctatggagataaatacttccttctttatcttcctgggaagatggacagttgtaagatgattttcttacaactttcagacagtcctgtgggaacacacagccagtgcccataagtagggccacatcagtagagcatccctgcttccctgccttctccatctgtcagtggcttctgctcctggggtcacagtccccaataaagtacacactaagccttcttcctaggggagctgagactcgaatacattcagagccctttaagaagttctctcacagacttatttttgttttcaaaattcaattcctctaaatatatttctgttcctctttcgtctaagtctcattctttttgactgagaagtcagaagcaaaattaaagtttagtgactagggtttttttgtcctgttatacgttgacattccttaccgtgggtgtatctgtgctttctttgctcttactctgaacatgcccaaaaaaactcttgtgttatctttagcatatttcataagccacaattcaggaagttagagaaattgctccctggtgcagagcaacagaactgccgacctctttccactccaattgcggtgaaagtgatatctctctgcctgagctgacgttggcctttaggcttctctaattatttccttaggttagatttctagaaacacagggtcaaagggcacagatattcacatataggcaagttaccttcttcttgagatgtagcaatttaaactcataacagcagtacataacagtgcccctttctctgtgtctttctccaacacagacatcttgctttaattttgcatttatttgattctttctgagaagcagaaggaatatatgttggccgtttgcatttcttcttttctaaattacctgttttctttccttccttccttccttcctttctttctctttctttctttcgagacgaagtctcactcttgttgcccaggttggagtacagtggctcagtctcggctcactgcagcccccacctcccaggttgaggctattctcctgcctcagcctcccgagtagctgggattacaggtgcctgccaccacgcccagctaatttttgtatttttagtagagatggggtttctccgtgttggccagactggtcttgaactcctgacctcgtgatccacccgccttggcctcccaaagtgctgggattacaggcgtgagccactgcgtccagcctattactattattctttttttcttttcttttttttctttttctttttttttgaaaccggagtttcgctcttgttgcccaggctggagtgcaatggcgcgatcttggctcaccgcaacctctgcctcctaggttcaagcaatcctcctgcctcagcctcctgagtagctgggattacaggcacgcaccactgtgcccggctaattttgtagttttagtagacacagggtttctccatgttggtcaggctggcctcaaactcctgacctcaggtgatccgcccacctcagcctcccaaagtgctgggattacaggcgtgagccaccacacctagctaaaaattctttaataggtctctttaatgttttaagtagtcctagatttcccctgtgaaccatcttgaaagttttgccttttattctcagttctcttttgctggcttcttatcaggaaacaccacctgactgatttgagatgtaaagtgatggagtgcaaagaccacaggtctctgtattcaaaggtctaggtgcaaggtacaaccttaccggatatttcagagcttgtcttttataatttttgagctgagaaggtcaggtgagataaactgtatggactggaattctgatttgagatgtaaagtgatggagtgcaaagaccacaggtctctgtattcgaaggtttaggtgcaaggtacaaccttaccagatatttcacagcttgccttttatcatttctgagctgagagggccaggtgagataaaccctatggactagaattctgaaaggagagcagtatgtcaacaaaggaggattcagcaactgcctgatgcaatctctagttatcttcgtcctgcaccagcagtatatgatgctatctcatccaactccattcttcagatttgtcatctctcctttacttggataaaacctggctggaaacttggcttcagtcctccatatccatctgttttaggcagacttaactcagctttacatctttgcaaacttacccacgcacatcagcatccgagaaatttccatactctttgattaaaattgcagtaaaagtcacaaaggaccttgcttaaaatgaaaggaagtttctaggaactctaagctcagtaactttatgaccattccctgtagagctgcaaaggtctggatttgaaaagtcataagtagcaagggaattgcgccagaatacctgtcttttgctggagcaaatccattgcctggttcatgcctatgtcacataggcagggcaatgccagacttttcttttctttttttaaagacagagtttcgctcttgttgtccaggctggagtgcagtggcacgatcttggctcactgcaacctccacctcctgggttaaagcgattctcctgcctcaccctcccaagtagctgggattacaggcgcccaccactaagcccggctaattttgtgtttttagtagagatggggtttctccatgttggtcaggctggtctcaaactctcaacctcaggtgatccgcccaccttggcctcccaaagtgctgggattacaggtgtgagctacagcacccggccttcttttttttctcttttttttaattttttttttttgagacggagacttgctctgttgcccaggctggaatgcagttgctcactgcaacctccgcctcctgggttcaagggattctcctgcctcagcctcccgagtagctgggactacaggcatgcgccaccacacccggctaattattgtatttttattagaaatggggtttccacatgttggccaggctggtctcgagctcttgacctcaagtgatccaccctcctgggattacaagagtgatctgtcccctcccctcccctcatctccccttcctccactcctcttcccttctctctcttttgagacagggtctcattctgctgcccaggctgcaggtgcagtggtgtggttatggttcactgcagtcttgatctcccaggctcaagtgatccttatgcctcagcctcccaagtagttaggactacaggtgcatgccactgacctggctaattttttaaatttattttttgtagagatgtagctcagaatggtcttgaagccctggcccaagcaattctccctccttggcctcccaaagtcctaggattacaggcatgagctactgcgcccagcccagacttttttgttgttgttgttgttgctgtttctcacccaggttgcagtacagtggtgcgatcacagctcactggagccttaacctctggggctctggcaatcctcctgcctcagcctcccaagtagctgggaccacacacatgccaccactctcagctaattttttttttaatttgttgagacagggtctcactatgttgcccaggctggtcttgaactcctgtgctcaagtgatcctcccactttggcctcccagagtgctgagattacaggtgtgagccaccacacgtggcccccagatattctttaagtgtaaagcttgactactatttgaggcttgacttctgctttcaaattgattttgaattacatacaagtaatttccaaggagagtcagttaacaagataaaattgtggtctttaccatatgtgcattcttttatattctcagccccattagtgcttgtataagtccatgtgtactaagtaaatctcttttaaccagttctttccaactgtgaaaagaagtaaattatatggggctgggcgtggtggctcgcgcctgtaatcccagcactttggaggctgaggcgggcggatcacttgaggtcgggagtttgagaacagcctggccaacatggtgaaaccccattttcattaaaaatacaaaaattagtcgagcgtggtggcgggcacctgtagtcccagctactcaggaggctgaagtaggagaatcgcttgaactcaggagatgaagtttgcagtgagctgagattgtgccactgcactatagcctgggcaacagagcgagactctggctcaaaaaaaaaaaaaaaaaagaaagaaagaaattatatggatttttcagggagcttacaaggataagaaaataggacttggctgggcgcagtggctcacacctgtaatcccagcactttgggaggcagaggagggcgggtcacctgaggtcaggagttcgagaccagcctggccaacatggtgaaaccccttctctacgaaagtacaaaaattagccaggcatgatggcgggtgcctgtaatcccagctactcgggaggctgaagcagaagaatcacttgaatctgggaggcggaggttgcagtgagctgagattgtgccactgtactccagcctgggcaagagagtgagactcaatctcaaaaaaaaaagaaaaaagaaaatagggctgaggcaggaggatcacttgataccaggagtttaagactagcctgggcaacatagcaagaccccatggctataaaattaaaaaaggattaaaaagtagataatattaaaacaccttagatttttcaaagtaatggagctcttttttttttttttttttttgagatggagccttgctctgtcacccaggctggagtacagtgacatgatctcggctcactgcaacctccatctcccaggttcaagcgatcttcctgcctcagcctcctgagtagctgggattacaggcacgcaccaccacacccagctaattttttgatttttagtagagatgtgcttcaccgtgttggccaggctggtctcgatttcctgatgtcaggtgatccacccgcctcagcctcctaaagtgccagcaccaatgtgcccggctggaatggagctcttaatataaattgtacttattagtttttcgtttcagcctataaaatgtacaaatctttctctttaaaaaaaaaaaaacactcctttgatgctgtatgccttgcaagttaacacactttccatctactcttcatagcagagttcttacaagagagatccacgcatgtgcttttcatttcaccattgactcagaagttacatttatgattttatcacaaagaaatattgagagaggcatacagagttatggataaggatgctcattacaacctttttacaatactaaaaaattggaaacaacctaaataattgatgatagggaggctttaaaaaattatggcatctataaatgagaatttggctttgctgcaaatagcagatgacccacaataactgtggtaggaggagggatgctatctgggaccgtgtgatggctcactccccagagtccttgcagcttggtttcctcctttttcattactctactctgtctggcttcatacctaagattacttcacagaccaagagggcttctcctgttctagttatcagcaagagggactagacaaagaaaactggggcaactatcattcaccaactgtctcttaaggaagcatccaaaaactgacttacatgtttatctagggtagaattgttactatattagagaagacagaaactatgcttggacccaggccttgagctgattagggttgaactttaggcaaagaacaactcagatagttagtctaaaaggagttttttctacatttatctgtttgaaatttcccagcatcaaattttatattttcctatattgaggggaaggggccccattaggatattttgcccttttgcccaatgtatacactttttaacccataatctgttttataaaattgcaatctttcggcctggcgcagtggctcacgcctgtaatcccagcactttggaaggccaaggtgggtggatcacgaggtcaggagatccagtccatcctggctaacacggtgaaaccccgtctctactaaaaatccaaaaacaaacttagccgggtgtggtggcgggcgcctgtagtcccagctactcgggtggctgaggcaggagaatggcgtgaagccaggaggcggaggttgcagtgagccgagatcgcaccactgcactccagcctgggtgacagaaggagactccgtctcaaaaaagaaaaaaaaattgcaatctttcaaacatcttgcttacatgcatcagcccccagtggctggtataattccctttggttcatccaaatatagagtacttctgtcaagcaactagtgcttgttaaaccccctaacacacttccttgcatagggtagaagcacaattacttattgtttatttattttaaaaaattgttcattgacttgagttgtaccatgtaccacctaagaaatagaagaataaggcacaggcctagtcttatattttaagtttagctaaagagacacacaaaacaacagaaaataatagaatactattcaaatcaggtacgaagtggggtagtctaagctatagttggtagaggagttcagtgaaggtttctaaatacaaggaaggtgtgtagtaaagaatttggccttgtccaatgagagatctggtctctcattggcttttgggaggttatctgtgtcatacctgatagcagtgtctttgctctgtgagggaagctcacttggagaaaggctcacaggaacaggtgttgctccacgcctttcttttagtggctccaccccctgatagtgggtgagatcaatcatttgcttatgacacagtcctagacttaagagttggaaggactctcaggcagtcatcaggtgcatcccagaattattttatctttactgatgatgcagctcctgccaggtcacatggaaagcaggggagctagaactcgggttctgtgtcatcctaccccatgttctctctgccacatcacattgcctgctcgtgacactggaccactgtaatcatggacggtactctgtccctgagcttctggggtgaaactggctattaacccttgccatgtctcccttccctgagccttgaatcctgcttgccctgtggtgcccccatgtcccccagtacggttctccccgctgccctctataaccaagcacctggcaggttattgcttttccataaagctggaaaactcttagacagtgagaggcaggtggccagactgctgctgtcctttgaaggtttagggccaagactgagcagcaattgaaagtatccattgaacacctgctgtgagtaagacatcgcctctatcttaagcctttgctctattccaatggaaactacagtttccaggctcccatgtccattggcttctggaggggtttgaccagtagatggcaatgatggatgactaggaggtagcagagggaagaaccaggtatttcccccatcctccaccctaagtggcatgtccatcagcaggttggtgttttccctgacatctagctagttctcctgacatctagttcccaccactgctccccttccatggctctgctgtcccctatcttagaggtggtggtgcccttctgctgtggccagtctctgcgttgtttcactgtttcctgtttggcctctcagctcttcccatacagtgggtaaacaggtctctatattaaattccttctgaaatacctggtggtctccattttcttggttagaccttgactgattaatggctcatgtaacatccgtccatcgggggacttatgataggttggagagtcaagaattaaatatatgcagcctgtaatcccagcactttgggaggctgaggcgggcggatcatctgaggtcaggagttctagaccagcctggccaacatggtgaaaccctgtctgtactgaaaatacaaaaactagccaggcatggtggcgcacgcctgtaatcccgattactgacaggctgaggcaggagaatcgcttgaacccaggtggcggaggttgcagtgagctgagatcatgccactgcactccaacctaggtgacagagcaagactccgtctcaaaaaaaaaaaaaaaagtatatatatatatgtatgtaaaatactagtaaaataaaatgtagagattccatacatgtactaaaaatcactgagttattagctgggcttggtggctcacacctgtaatctcagctacttgggaggctgaggtgggaggatcacttgagcctggaagtcaaggctccagtgagctgtgattgtaccaccgcattccagcctgggtgacagagcaagactctgtctcaaaaaaataaattatcagccaggtgtggtggctcacgcctgtactcccagcactttgggaggccaaggtgggtggatcacgaggtcaggagtttgagaccagcctggccaatatggtgaaaccctgtctctactaaaaatacaaaattagctgggcatggtggcacatgcctgtaatcccagctactcgggaagctgaggcaagagaatcacttgaaccggggaggcagaggttgcagtgagctaggatggtgccattgcattccagcctaggcaacaagaccgaaacaccatctcaaaaataaataaataaaataaaatattcaggagaaaaaatgaaaaatgaagagtgagtagattagactagtgatctccaaacatttttatcacactcccctaatggcaagaaacaacatttgagcttgcacctccatatttatgtacttatttattcaaactgtgtacatgttaaaccctgttggtatatgatgccttataaaatagctacaaaatataaatgtaaacagaaaaacaggtaaatagaagtcctggtgattcattgctttacctcaatgagtcatcttacacatctcctgtggtgcctaccccactttgaaatcataaaccgcttgtagaagtggccatcaaagagctctgcaagggactgcaagaaagaaggactgggggccaggtgcagtggctcacacctgtaatcccagcactttgggagactgaggtgggcggatcacaaggtcaggagtttgagaccagcctggccaatatggtgaaaccccgtctttactaaaaatacaaaaattagctgagcatggtggcaggtgtctgtagtcccagctactggggaggctgaggcaggagaatcccttgaacctgggaggcggaggttgcagtgagctgagattgctccactgcactccagcctgggcaacagagtgagactccatctcaaaaaaaaaaaagaaaaaagaaagaaagactggggagttctttcttttttttttaaaggagggtttaaattaggctaatgcagcaataacagccacacttttgatgtttacacatttctttacagttcttgaagtctcgctctgttgcccaggctggagtgcagtggcacggtctcggctgactgcaagctccacctcccaggttcacaccactctcctgcctcagcctcccaagtagctgggactacaggcgcccgccaccacgcccggctaattttttttttgtatttttagtagagatggggtttcaccgtgttagccaggatggtctcaatctcctgacctcgtgatccgcccgcctcggcctcccaaagtgctgggattacaggcgtgagccaccgttccggccctttttacagttcttaaatgctttctgacctgtgttatctcattgactctttcaaataatgagaaaggaagtgaatcaaaataggagatagattggggaaaacttgaacgtgtgaccaagaggagtttggacttgatcataaaagtaatgatgctttatcagatgtgtcacatcacagagcagatatttacagtccaaagtccctccctaaatgattggcctcacccacaatgactgggtggagccaccgaaagaaaggcatggagcaacacttcttcctgcatcgcccctcaaaagagcagatcccagttctctgaagataaatggaaggcagccatgaacttccccctctttgaggtttatctttcagcaccttagcacctcagaacaacagagaattagtaggcttagcctactatcctcctatcctttctctcgtgtgctaaagttccatacaatattactggtgtattccctctccaaaatgatgccttaatacatttatgtgaacctctcagccaggagtatgtatgtagctattgtcattccaagacattttctctgttcccattgtccatttctccttcagctgcgtgagctcaggggcttatgttttacacactatattcagctccatttccaggaaacaaaactgaactttgtcctgatcccgctttatccctttctcctgatcctgtccctcacctgctgagctgtctgtcctgctcactgcaggagcactatgagaaccacgtggagtggccgacaggatagggctttgaaaagtacaaagctgccctctgtagaaaacaccctaaagcagaggttcccaacccccaggctgcagaccagtacaggtccgtggcctgttaggaaccaggcagcacagcaggaggtgagtgacgggcaagcaagcattactgcctgagctctgcctcctgtcagatcagcagtggaattagattctcataggactgcaaaccttattttgaactccgcgtgcgagggatctaggttgcacgcccctatgaggatctaatgccccccacccctgtccatggaaaaactatcttccatgaaactggtccctggtgccagaaaggttggggaccactgccataaggggttggcagatgaaccagctgaagcaaaggaaacaattacattatttattgctgaggctcatgttgtttttgtgctgaaaaacctccagtgactctcctttgcccaaagtccgaaagggggccagttaatgacctttgtccatagggaggtgataacagcctgcctggtagggagcagagcccatgtcctctcagtagcattatgggtgttgctgtaggacctgacccaaagagagataggtatcagtttataagattatgaataatattttcaaaaaagggggccaagatgaggccttagtctcatatcaggtgacaccatagatcaaagcacagaaaagagacaggaaggatttcagcaggttggagaaggagataggcctgtgatgtggccaggtggagacacagataagttgaagtttattctggtaaagacctttgtacctgacatgcagcaagtcccagtcctgatggagggaggatgtagccagctccctagtgctaaagcattttggctttgcaggcaaaaacctgcattcaaaatctaactataacagccttgcaaacaagctacttaacttcatcggtaaaggctctgtcaaaggccaggtgcagtggctcacgcctgtaatcccagcactttgggaggctgaggtgggcagatcacctgaggtcaggagttcaagaccagcctggccaacttggtgacaccctgtctctactaaaaatacaaaaattagctgggtgtggtggcgggtgcctgtaatcccagctacttgggaggctgagcaggagaaccattcgaacccaggagatggaggttacagtgagctgagatcatgccattacattccagcctgggtgacagagcgagactctgactcgggaaaaatacataaataaataaatacaaaaattagctgggtgtggtggcacgtacctgtaatcccagctactcaggagactgaggtgggagaattgcttgaacccgggaggtggaggttgcggtgagccgagattgtgccactgtactccagcctaggcgacagagcagtaatcccagcactttgggaggccaaggttgggccaatcacctgaggtcaggagttcaagaccaggctggccaacatggcgaaaccccatctctactaaaaatacaaaaattagctgggcgtggtggtgggtgcctgtaatcccagctactcaggaggctgaggcaggaaccccggaggcaaaggttgtagtgagccgagatctcaccattgcactccagcctgggtgacagagggagactccatctcaaaaagaaaaaaacaaaacaaaacaaaaaaaacctctgtcaaaagatgttcatgaggttaatgaagtaacatatctttgtactttttattaaagtactattactaatattctcataaagtgcatatcatcatgccttgtgctcaagttcatttttaacacatttgtctccccaacttgtggacagagccttgtctcattgatgttgtttcttaccctcagcaacaagcataaagctccaaaagtgtgttgtgtggaattatgcattaatttctagttgtttcatgtttgtaaatctcaccttaactgaaatctgctgaagcttaagggcagggacccttacccccaatgtaactatcataaaactgggcatgcacctactggagcttagggagaaggttgtgcctgattagaaaaggtgttcaagttgtgcttctctcttgtagggatttcccagatgacccaggcatgcagtgggacacagagcacgtggccagagtcctccttcagcacatagaagtgaatggcatcaatctggtaagggggcagctccctgaatggaaaacctgaggtcttggtcccattcacaccaggtggtttctgtaattttttctgtggccaccctcccacttccagtccttctccagggccactctctaaggaggccagaacttccaatgctcaccattaaacctactgaagaacaaacacaccttttgatatctttacgatcttgtgtgagactgaataactaaattatcagtgctcagatagaggcagaagttttttctaaactgtgtcctccttaacaccctcaagcccccgcctttgtcctgccatctaaaaattcaggtcccccagagcctgcccagtgattctcatttatacagaacttgacctcaccttttaccaagcattttcacagagtatcattttaactttaaaagtaaaatttgtgactgggtgtggtggctcatgcctgtaatcccagcacatcgggaggccgagttggacggatcacctgaagtcaggagttccagaccagcctggccagcatggtgaaaccccatctctattaaaaatacaaaaattagccgggcgtggtggcatgtgcctgtatcccagctacttgggaggctgaggctcgagaatcgcttgaacttgggaggcagaggttgcaatgcgcaaagattgtgttactgcactccagcctgggtggcagagtgagactctgtctcagaaaaaaaaaaaaaaagtaaaattatcagtttacattgaagaaactgaggttttgcagaggccaagcagcttgtccaaggtaaacaagtggtggtgaagccaggatttttaagcattgatttcttcattccaaaaaacatgagaatgcattcatacccactaaggaagaaaatttttgatgcaattagagcaatagcagagatttgtatttactgcaatggtggacaagcctagcaacaccagtctcagctcttctaggatcagcaggactgcttagcccatagtcaattttaaagctgccaaggaggcttactgtctaccactcaaaaaatatataataatccttcatgaggtaatatctaaaattccacatttaaagcctcaccatttggcttaagttttgattaagttctcatgaaaacatgaatcctgctggcagagaaacatattaggcttttttttttaattttttttttttaagacacaggttctccctctgttgcccaagctggagtgcagtggctgcctcagcctcccaagtagctagaactataggcacatgccatcatgtctggctaatttcttttttcttttttttttctgagacagagtttccctccatcgcccaggctggagtgcagtggcgggatctcggctcactgcaacctccgcctcccgggttcaagtgattctcctgcctcagcctcctgagtagctgggactacagacacgtgccaccacgccaggctaatttttgtatttttagtagagatggagtttcaccatgttgatcaggctggtctcaaactcctgacctcgtgatctgcctgcctcggcctcccaagtactgggattacaggcatgagctaccacacccagccaatttttaatttttttttttttttttttgagacagagtctcgctctgttgcccaggctggagtgcagtggtgtgatcgccgctcactgcaagctccgcctcccgggttcacgccattctcctgcctcagcctcccaagtagctgggactacaggcgcccaccaccacacccagctaattttttgtatttttaatagagatggggttcccctatgttagccaggagtctccatctcctgacctcatgatccacccacctcggcctcccaaagtgctgggattacaggcgtgagccaccacgcccagcctaattttttttttttagagacaggatcttgctgtgttggccaggctggtcaccatctcctgggctcaagctgtcctccctcattggcctcccaaagcactgggattacagatgtgagccactgcatcaggccctgagagcagattttcattgatatattcattggactgtttctgttctctaatgacagaaatacaactgaaatttagtacacacaggccaaaacaggcacctaatttgctcaccctgagtcacctaaaagctgagctgcagatgggcctcaggtaccctgaccctaccacgactcatctccatctttctctgcatgttggttttattccttttcctggctggaaaaatggtcaccagcagcttgcaggccccacactccctgcctacccttcccagaggatctgagcatgaaagcggtaatgttagatccatgggcttaggaataatgcctagctgtgctgactggggcttgccttggttctcttactcctcctcttcagcccacacagtttgaagttctcagagcctccacagcctcgatatgtagacagagctgaggttggaggttgtcatggccagcctgaagtactccctggcacctcattttccatgctagtgccttcccagtccctaaatactctctgtcctcccctacttcagtgcacgagaactactggtcttccaaattgctcctgctgtagggtactcttatctttttttctttttcttttttttctgtgagacagagtctcgctctgtcaccaggctggaatgcagtggcgcgatctcagctcactgcagcatccaactccctggttcaagtgattctcctgcctcagccttctgagtagctgggactacaggtgcgcgccaccacgcccagataatttttgtatttctggtagagatggggtttcaccatgttgccaggatggtcttggtctcctgacctcgtgatccgccttccccggacttccaaaatgctgggattacaggtgtgagccaccgcacccaggctactctcatctttttaaacttggaatccaaaatcctctataatctgacccttactgaagtcctgaacactggtgaacaacgttggtctttgccgaggggccagatttctttttcagaccatgttgcagctgaccttgaccctgagtatctgagggaggagctttggggcacaggcagctctgtgtgccattcttgctttcagaagagtctcccatgtttgggtcccagaaaagtgatctgtggtccaggcacccctccagaccttcttctcaaagaagagctaactttgatgagccctttttgaggctccggcagtatttgctgtgtgtactgcaacatatgttgctgtttattcttaaaagtgcagaccacgtcttgcaaactagactaaggcctgtgaaggccaaggctgtgcctggtatctttatatctccaagaactagagcaggcccctggacagtgctccttaccaaactgctgcagctgttaactgccacctccctgcctggaagtctttcctgtggtgctgagctgctcacacttactcaagtgagtcgacttttattgtcaagagaatcttcaattgatttaattgctataaacaaggaaatcgtataaaacagctccttactaataaatttctccttttttttttttcctgaaatgaagtctcgctctgttgcctaggctggagtgcagtggcatgacctcggctcactgcaacctccgcctcccgggttcaagcgattctcctgactcagcctcctgagtagctgggactacaggtgcatgccaccacgcccagctcatttttgtatttttttttttctttttttgagacagagtcttgctctgtcgcccaggctggagtgcagtggcgtgatctcagctcactgcaaactctgcctcccgggttcacgccattctcccgcctcagcctcctgagtagctgggactacaggcgcccgccaccatgcttggctaattttttgtatttttagtagagacggggtttcgccgtgttagccaggatggtctcgatctcctgacctcatgatccgcccgcctcggcctcccaaagtgctgggattacaggtgtaagccactgcgcccggcctactaacaaatttcttgtgacacacttgctattaataaggaaactcaagttgacagtacagttgggaataatttctctggcctgcacttagtgccatagtagaagtataggatcatgctaacaccgtggctagtgtagctataactggccatcattcgagctgagcatgggtttccattcagcccagaagtttcaactgcacacaagagatgatgaagcagcaacacagaagcacagacagaggtgtggagcacagtctaagccatggggagagattttctcacctgggctgcaccaggatgagagcataagctctccaccatcatccaaagcaaagctggctctgcagccatcaatgcaggaaactgggttctgtctggtcccagctctgtagtactgcaggaacatcataaagaccataaggaatggcagacaggacagagttttgaaaagtacaaagctgggtgggtgcaatggctcatgcctataatcctagcactttgggaggctgaggtgggaggatcacttgaggccaggagtttatgaccagcctgggcaatatatcgagactccatctctattttttaaaaaataaaataaaataaatgttaaaaagaaaagtacaaagctaccatccttggaaagcagcctaggggggtagtagtgtcttctctgggtgttaagcaggctaggtcctgggcctcaacccctctacctcaactttcattcagtaagtatttattaagtacccaatatgggacatttgctttaggtggtgaactgggaatacaacagtgagccagaagcacttagtccctgctcccatagagcaggatgtgtcagtacagcactattgcgcatttgagactggataatttgttgtgggggttggccttgtgcattgaaggatgtttagctgcatccctggccactacccactagatgtcagtagcaatccccctcctcagttgtcacaatcaaaacgtctctaggccgcaagcagtggctcacacctgtaattccaacactttgggaggctcaagcagggggtggattgcttgagaccagcctgggcaacacagtgagaccctgcctctacaaaaaaatttaaaaattagctaggtgtggtagcatgcacttataatcccagctactcaggaggctgaggctgaggtgggagaatcacttgagcctgggaggttgaggctgcagtgagcatgatcacgtcacgtcactgcactgcactgcagcctaggtgacagaatgagagcctgtctcaaaaaaacaaacaaaaaaaacctccagaagttaccaaatgaccctggggcaaaactatcctaggtgagaaccagtgtcttagaaaccagagcagccccacagttacctatttattggggtctgggtaagattttatttgaacaaatacttttgcactttaggaaaaaataaaagtggatggagttttgtaaagaatgacaggtgccattgtcatgtacaaatctgcaaagttcagagagctgaatacaatttagcttaaccctacttgcaacagaaagggggaaactacaaggtacaggatgagagaaaaaacaaagactggagaatttcaaaagtgatggagctgaatttcatgtgaccccaaatccactaaccaagggactgcctgccctccagcacccttctgatatccatccagccagagtgctagccagctccacctgatggcaacagcctgggagttgagatactctagggttttctgctgtacagttttcttttttgtagcaagatggggttcttgttcttgtcgcctaggctggaatgcagtggtgctatcatagcccactattacatcaaactcctgggctcaaatgatcctcctgcctcaacctcctgagtagctggggctacaggtgcacgctagcaagcccagctaattttgttgttgttttttgagatagagtctcactctgtcaccaggctggagtacagtggcacgatctcggctgacttcaacctccgcctcccgggttcaagcaaatctcctgcctcagcctcccgagtagctgggactacaggcacgcgccaccatgcccagctagtttttttgtatttttagtagacacggggtttcaccaacctggccaggctgatcttgaactcctgacctcgagatccacccaccttggcctcccaaagtgtcgggattacagacgtgagccaccgcgcccagcctcgctgtacagtttttaaacactatttcttcacttaaacctagcaaggaaagtagagctggcattacttttcctgatcttacacatgaggaaaccaagacattccatgttgaaataacttccagtagtaaagttttctgacttgcccaaggtgctgtaattaactagagttagagataaaagtagactttgatctcccccaaccaccaccccaccacccaccttgttctgcatggaagggtgggatcagaaccaggtgtttgagttatacgatcttttttttttttttttttttcttgagatagagtttccctcttgttggccaggatggagtgcaatggcgcgatctcagctcaactgcaacctctgcctcctgggttcaagtgattctcctgcctcagcctgccaagtagctgggattacaggcatgcgccaccaggcccagctaattttgtatttttagtagagacggggtttctccatattgatcaggctggtctcgaacccccaacctcaggtgatctgcctgcctctgcctcccaaagtgctgtgattacaggcgtgagccaccgcacccggctggcttttaaacaatatcaacaccgaaggggtgagattcttagagtgacagttcagagacagtcaggagagtaggggagatggaaacacctgctactaatggtaaggctcggctgcgactgcccagccctgggaaagcctttctctgcagagcacttgatcccacggaaacttggcagtaagagctttaaaaggaaagggagagggaaatgaaagcgagagggttctgtcagggagctgctcggttttaacaaaggaggccattcccatggcacaacccttctttctgttatcaggagaccatgttgacattaccctgaattcacctaaactggtgctgactcttcatgaggttcccaatgattcctgaatctcatgatggccagaagccggtctcctcatggccatggcactctgagaggatgtttggtgactggaccttgtgttttgtggttgtttccactgtctccacttcttagatttggtcctcttgctaggccatagggtgtgccagtgcagtaaagtccagggcaccttggcctaggtgctaactccttcaaagtttctgctttgtttccacagctgcatgtttccagcctgtgctgtgcacgctgggtgggagagggcaacttgaatgcaataactacacctagcacagttggcaagactctttctttactatcatgaaggaaaccacatttaaaaatgtgtccccttatgtatcctctgggcattgcatatagttctgtcatcaaaggtaagaatgattttaaccccagtgcctggtacagagtaagtgctcagtaatgtcattagctgttattacagctattaccacaacctcaaaaaaaaaagtttggctgagcacagtgtcttatgcctggaatcccagcatttcaggaggctgaagtaggaggatcgcttgaccccaggagtttgagaccagcctgggcaacatgacaagaccttgtctttacagaaagaaatttttttaagtagctgggcccggtggcacgtgcctatagtctcagctacttgggagaggaagacaggatttcaaggagcccaggggttcaaggttacagtgagccatgatcacaccattccagcctgggcaacagagggagaccttgtctcaaaaaaaaaaaaaaaaagcctggatgcagtggctcactatttttaaaaagtaaaataaaataaaataaattttaaaaagaaaagcacaaggctgggtgcagtggctcatgcctgtaatcccagcactttgggaggctgaggcaggtgcatcacgaggtcaggagtttgagcccagcctggccaagatggtgaaaccccatctctactaaaaatacaaaaattagccgggtgtggtggcagatgcctgtaatcccagctactcaggaggctgaggcagggaactgcttgaacccgggaggaggaggttgcggtgagccgagattgtgccactgcactccagtctgggtgacagggtgaaactccgtctcaaaaaaaaagaaaattacaaagctgccatccttggaaagcagcccagggggatagtagtgtcttctctgggtgtcaagcaggctaggtcctgggcctcaaaccctctatctcaactttcattcaataaatatttattgagtacccaatatgggacattcactataggtggtgaactgggaatacaacagtgagccagaagcacttagtccctgctcccatagagcaggatgtgtcagtgcagcggcactattgcgcatttgagactgtaatcccaaaatgcctgtaatcccagcattttgggaggccaaagcaggcagattgcttgagcccaggagtccaagaccaacctcagtaacatagtgagaccttgtctctactaaaaatttaaaaaattagccaggtatggtggcatgcaccatactacttatacactaatttaaaaaagccactgcatccaggcttttttttttttttttttcgagacaaggtctccctctgttgcccaggctggaatggtgtgatcatggctcactgtaaccttggacccctggactccttgaaatcctgtcttcctctcccaagtagctgagactacaggcacgtgccaccgggcccagctaattaaaaaaatttctttctgtaaagacaaggtctcgccatattgcccaggctggtctcaaactcctggggtcaagcgatcctcctacttcagcctcctgaaatgctgggattccaggcataagacactgtgcccagccaaacatttattttttgaggttgtggtaatagctgtaataatagtgtataagtagtgtattaatagctgtaaaagtagtgtcttcccagctacttaggaggatgaggtgggaggattgcttgagcccaggaggtcaaggctacggtgagctatgatcatgccactgcactatagcctgcatggcagagcaggaacgcttaaccatctcatagataactagattagtcttcttctagggacctaaagagcaaagcgataaagcgagcataaaagcagtttgaaaagtaagtgacagaagcatgaaaagcatcgtttttgaattagttcttacttggattccattgatgagcacaaaacagtaatctggttcaggatagaaatataaacattaggccgggcacggtggctcacacctgtaatcacagcaccttgggaggccaaggcgggtggatcaccaggtcaggagttgaagaccagcctggccacataacgaaaccccatctctaccaaaaatataaaaaattagctaggtgtggtggcatgcacctgtaatcccagctactcggaaggcggaggcaggagaattgcttgaacccaggaggtagaagttgcagtgagccgagaaattgcgccactgcgctccagcctggtcaacagagcaagactccatcttaaaaaaaaaaagaaagaaagaaatataaacattaggccgggcacggtggctcacgcctgtaatcccaacactttgggaggccaaggcaagcggataactttagtcaggagtttgagaccagcacagccaacatggtgaaaccctgtctctactgaaaatacaaaaattagccaggcatggtggcacgtacctgtagtcccagctactcaggaggcagaggtgagagaatctcttgaacccaggagacagaggttgcagtgagccaagatcgcaccactgcactctagcttgggcaacagagtgagactccatctcaaaaaaaaaaaaaaaaaagaaagaaagaaagaaaaaagaaatataaacattaatcattagaagactttcttgaattatggcattctgttgttaaaattcttccattacccaccacttctgttgactttgtcaacatgttaataaattgaggctcatggtggtaactttaaagttacaggatcctaaaatgtcttctgaattattaaaaagtgtgtgtgtgtgtgtgtgtgtgtgtgtgtgtgtgtgttcagtgccatgaacagtgaagttaactatgtacttatcttttcaaataagggatccagtaatgactctcaagatgatccttctaaccagagtgtttgcttgcctgaaatacgatattccctcacagatgagctctccagaccccaggagaaagaataactgatcgaaactcatgtacttggttggtagctgtcagaataagagtgcaggtcttctgattctttttttttgagacagagtttcgctcttgtcacccaggctggagtccagtggcgtgatattggctcactgcaatctccgcctcctgggttcaggcgattctcctgcctcaacctcccaagtagctgggattacaggtgcccaccaccacgcccagctcatttttgtatttttagtagagagggtttcgccatgttggccaggctggtcttgaactcctgacctcaagtgatctgcccgcctcagtctcccaaaggtcttttacacagtgcttcttcctgcagcgtagcacgccttctcacatagaggatgcttgtaaagagcgtggactgtggagtcagaaagatctaaaccccaagaacagctccaccactcagtggcaaggtgatcacagcttcggcctctgcttcctgaacttcctcaggtgtaagatagggttaatactatgtctttgctcaataaatgttagccactcttattataacagagggcttgctgtacatgcagtcattatgctttacagtttaaaatagaaagaccaagagcgaatcccttcccagcccattccaatcccagttccaggttccttcatccatgcaggatggtcacctttccttggggacagcttgcctcttttcatcacccctaatcaatcattctatcctttcttcagtccttgttgtcgtttttatatttcttttattatttgagttagccttattattattattattcaaattattatttgttttttcttttttttagcaattattattatcatttatctcagaaaatctctatgacaattgtgtgaagtacaattatgattacatatgagataattgcaccacagacatgttatataacttgcaaaaagccacaaacccaataagtggtaaagcccaaagcacagaggttttctttcttttttttttttttgatcattcttgggtgtttctcgaagagggggatttggcagggtcataggacaatagtggagggaaggtcagcagataaacaagtgaacaaaggtctctggttttcctaggcagaggaccctgcggccttccgcagtgtttgtgtccctgggtacttgagattagggagtggtgatgactcttaacgagcatgctgccttcaagcatctgtttaacaaagcacatcttgcaccgcccttaatccatttaaccctgagtggacacagcacatgtttcagagagcacagggttgggggtaaggtcagagatcaacagcatcgcaaggcagaagaatttttcttagtacagaacaaaatgaagtctcccaggtctacctccttctacacagacacagcaacaatctgatttctctatcttttccccacctttcccccttttctattccacaaaaccgccatcgtcatcatggcccgttctcaatgagctgttgggtacacctcccagacggggtggtggccgggcagaggggctcctcacttcccagacggggtggccgggcagaggcgcccccaacctcccggacggggtggctggccgggtgggggctgcccccccacctccctcccggagggggcggctggccgggcgggggctgcccgcagccccccacctccctcccggacggggcggctgctgggcggagacgctcctcacttcccagatggggcggctgccgggcggaggggctcctcacttctcagacggggaggccgggcagagacgctcctcacctcccagacgggggtcgcggccgggcagaggcgctcctcacatcccagatggggcggcagggcagaggcgctccccacatctcagacgatgggcagccgggtggaggcgctcctcacttcctagacgggatggcggccgggaagaggcgctcctcacttcccagactgggcggccgggcagaggggctcctcacatcccagacgatgggtggccaggcagagacgctcctcacttcccagacggggtggcggccgggcagaggctgcaatctcggcactttgggaggccaaggcaggcggctgggaggtggaggttgtagctagccgagatcacgccactgcactccagcctgggcaacattgagcactgagtgaacgagactccgtctgcaatcccggcaccttgggaggccaaggctggcagatcacttgcggttaggagctggagaccagcccggccaacacagcgaaaccccgtctccaccaaaaaaatacgaaaaccagtcaggcgtggcggcgcgcgcctgcaatcgcaggcactcggcaggctgaggtaggagaatcaggcagggaggttgcagtaagccgagatggcagcagtacagtccagcttcggctcagcatcagaaggagaccttggaaagaggggagggggaagggggggggagagggagagggagagggagctatttgttttttctttaattcatttgtgtagaaatgaaatgttggaatacagactgagcttgtagttaataaacagatattgatatagctgtgaaaatggaaacagaggcaatctatgaataaatacactttttccatgaactcaaccccaggacacggtggacattgtccttcaaagctttttttgccctcagtatggcatgagaaaaagagaaccagtaattcaggctgtatctgcataaacagagttcacttagaagctagccaggaattctaaatgtgctaataaatggctaaaccaataagcaacaaagatattctgaacccaagttactatcatggctgaattccactctgctccactggctaggaacaagagtaaaacatcaaaccctggaaaacagtctctatgtggtcaaccacagcactagctacacaccactgatctgctcagaagtcacttcagatagatgctgcatttgaaaagtttcagggttctgttctctccttcccaagggaaggagacagctccattgaagttgaggtggtggagaaggcattcagtgaaaaccctgtgtttctctacaggtggtgactttcgatgcagggggagtaagtggccacagcaatcacattgctctgtatgcagctgtgaggtatgattctccgggtgatggatgtgggggagggtttgtttatttgattagggctcatggtttaaagtctaaagcactttcccacttgttatctgagcccatgaaactcactgctggcttatcttctagccctttttggccatgttgctcactgcatctcaccatgtcctctcgctgagaaatctctctcaagtcctagtacgaatgctcgtctcctaaacagctgaattcttttttatacactgaatactgcgaatggggtaattgactttattcatctcttttctgtggccacaggaagcttgagggccaaatttgcaagccctgtggcactggacaagactttaaggaatgagtgctgtcaatcagtgtgcctccaccttcaccatcttcttccccttactctcacttccgtcatgtgttttatacaactctcaaatctttcttggagaaggaggatatacatacataatatgaaatgtgtttgttcttcacagtcacccgattttactgatatttatttgcattttaccaataaaaagaaaatgcaagctcaaaggtattgagtgacatagagtcatacaaacatagatgtgtttcctgtcccctagcaaagtgcttctcctgggcccctgatcagtggtgtggcaggcctgtcccagctactgaggaaggaaagaagcaacttgaagggaaggacttatttaataaccttcttctaaacatgcttaacactcagactgaagcaatgcaatatgtaaagttggaaatgacctcaccaaccattaagtccaatcactgggaagtggtttgcccagcaccacaaggttaaactatggcagaggcagaattcaggaatcctagttctccattcattattctgtcagatgtatgtgaagaccaatccaaactgaagaccctccttgtccttaaattttacatcacttggtggaagatgctagaattttacccacatactctttctaggcagatttccctgtttccttgactatggaatgaggggaggctagactgttctccctgtaaagactattcggttcctggtccagccagcagccacagctttagaagagacatgctcctagtcgcattaggtcccttcaaattcaggaaagaaacattccctggttacagtctgaaatacaaatttttttgatgatatatggaaaaatgaggcagccccagagtggtctttccaaccacatggttactctgaggccttgagcttccaagactagcatggacagcaagccccatggagaactggaaaaatggtcccacctcattctggatgcacactgagcctggtgatttctctccgagaatttacactgcaccagagaaaggatcaggtcaggtctattgcaaacaaagagtacctcaacaggcagggggctggggcacttgagattgagtcacctggtcccattcctggtccagtcaccactgaagtggagaaaatagagaaggcgtcattctgggcagagaaagaacccaaggggacaactctgtgtagatagaactgcctggggccattttcctcagaagaggctggagtgccacaggctctcagcacgaaggagggccactgtgcttcagataaaacaattcatggacatgccaccaatctgccacaacctttttccccacagtcatctcttgcctgctaaattcgttagactcacgttagtcctcagccaccttgaaccttctgtggcatctggccctgcctgtccctcactgcaatgctgctttgacttatatggcaccagcttgccctcctcactctggcctttctggctacttctcattctcttcccggcttccctcccaccagtggccccttggtccccctgtccccagggctcactccccagtcctcctcagcacagcttctcctgtggctttaagggctataagctctacttccagacagcgcctctagctcactgctttccctggacatcagaatatccacagggctttgcccagagtacaggacaagccacttcattctcaggatcccagaaagttttttcagtcttttcttttctttctttctttctttctttctttttttttttttttttttttttttgagacagagtctcgctctgtcacccaggctggtgtgcagtggcgtgatctcagctcactgcagcctccgcctcctgcctcagcctcctgagtagctgggaactactggtgcatgccaccacgcccggttaatttttgtatttttattagagacggagtttcaccatattggccaggctggtgccgaactcctgacctcgtgatccgcttgcctcggcctcccaaagtgctgggtttacaggcgtgagccaccgcgcccggctcctttttcaggtttttctacctctcaggctctgccaggcagtcagttccatgaatttgtcaattgtctctcaacttctcttgtttaacccctgctcccaagagtctctgttcatatgtgtgtctgtgtgttgctggggctaccttcccaatccttctctgcccccagctttctaaacaacaaagtggggaagagacttggagctcattgcagttgacactcccctcctcttaaggtggcgagcacagaatgacctgcactgtcagaaggtaggcgtagggaagctcagaaaggagaaaggaaatatcagggaagagctatcagttagcattgtaaaatattcccccatcatactcacattacacttccaagagaaaaactatgaagagtccagcacagttaccttcattctctaatgggcaaagcttggaccagagtacttcacaaaccacagaccagcctctggattggctgtccctagctcaggtgcccatcctggtcccttcagctgttgccagaggtatgggatcctggaaatctatacagtgatttatgcaaaagaaaccacctggagactcacatggaggggaccatgggcatggcagcctttcctctgaaggcccctcctgttacctacaaaggaaatgatccttactcctctcactcttgtcctatccctcctccagggccctgcactcagaagggaagttacctaaaggtaaggcttgttccttttgcaaagggccacaagatactgtccctctgagaaacttatgagggggaaatttgcaaatccacagagagctgccctcagccgagcagaggcagtggttggggaggccgccacactcttcctgactcacctcaaggtacctggcaggttgtatctaccagcaagtgcctgcctgcagggccacctctggatgagtggggaggccaggtttgcccctcaacctgtctagctttttcacagggtggatgttttacacctctggtattcttccagtctgaactcaatcccatcccccaaccaattaggcaggttgtaaatgactgctgggtgcttgatgaaccaatctgcctgagttaggaactcttcctaacccacataaagtatttgaccctacctgaccatttactgcatgacccccatgcttagcctctctggaccagtttctggtctgtcatacctcaccggcgcaatacgaagattcaatgaatgaaaacgtaagtagtttgtgccctttctatgtgggatgactgaaaggagcttaccaagccatgatgactttggaacatgactatagtttgtttgattcttatatcaatcctgtgagacaggcaggtctcacactatcaacaccaatttacagattagaaaactgagactgagagtggttaagggactttgccaagtctgtcaattcttgactgacagagctggaaccaggtctctaaactcccaatacagtaattcctgtctcctttacttcctttggctttgaggtagccagatctcaacctctagcagccaacctttttctggtagggcacaccgcagggtagagggtagccagccaggtcttctatggcccttttactcgttctagctgcaagaatcatgggcacagggcagctttagtgccacagaaacacgtggcaatgctgtggccactgtcctgccctgccctgagccacagggtagagggaggatgctcaggggaaaatctggctggaggcctcaaggcttatcacttcaccctgtctcctctccatccagggtgctctgtgctcacgcttcagtctgtgaatgtgctgcgcaagtacatctcccttctggatctgcccttgtctctgcttcatacgcaggatgtcctcttcgtgctcaacagcaaagaagtggcacaggccaaggtgaggattgtaaattcctggacaccccaactcagatccctgccccagacccctgtctcctcaaagccccacctctgcagaagccctaactgaaggtttttcacagtggttcagcacctgtccctgagaattagggctaggccagctagatcttgggaggcatagatttttcaatgactttagccttttttttctaattataaaaataatatatgctttttctaaaagtaaataacacatgctcattgcagaaaatcttgaaaaacataaaagcatcaaaaagaaaataaaaataagaacaattacctgcagtcccaccaatcacaggtaatccttgttaacatgttgggctacatctttctactctttttttttttttgagacggagttttgctcttgtcacccaagctggagtgcagtggtgcaatctcggctcactgcaacctccgcctcctgggttcaagtgattctcctgcctcagcctcctgagtagctgggattacaggcaccgccaccacacccggctaattttttgtatttttagtagagctggggtttcatcatgttggccaggcttgtctcgacctcctgacctcgggtgatccacccacctcgacctcccaaagtgcagggattacagacatgatccactgtgcccagccctactctttatatatatataatgtgtatgtgtatacacatttcaaatgggatcacacagtgcctatttaaaaccagctttggccaggtgtggtggctcatgcctgtaatcatagcactttgggaggctgaggcgggcagatcacgaggtcaggggttcaagaccagcctggccaacatgttgaaaccccgtctctactaaagctacaaaaattagccaggcgtggtggcatgcacctgtagttccagctacttgggaggctgaggcagaagaatcgcatgaacccgggaggtggaggttgtggtgagctgagatcatgccactgtactccagcctgggtgacagagaggattctgtctcaaaaaaaaaacaacaaaaaacctgctttaacaatacgttatgggctgggcacagtggctcatgcctgtaatcccagtactttgggaggccggggtgggtggactgcttgctgggcaacagagcaaaatcccatctctacagaaaaattagccaggcatggtggcacatgccagtggtcccagctactcgggtagctgaggcaggaggatcacttgagcccaggaggtcaaggttgcaatgaaccctgatcataccactgcactccagcctgggcaacagagccagaccctagccaaaaaaaaaaaaaaaaaaaaaatcaaaactatttattatgaacattttctcctatttcatttagtattcaaataccaatggctgccaattacgccactgtatgtatataccataagatatatcacgaatcccttactgttagacattttgatttgccactttatcactgttatacatggagcgatgctcccagcttgagtttaagaagaattcagacctgccaggagcctctgtaaagagcctaggggaggccagacgccgtggctcacgcctgtaatcctaacactttgggaggccgagacaggcagattgtctgagctcaggagtttgagaccagccagggcaacacggcgaaaccccgtctctactaaaatacaaaaaagtagccgggcgtggtggtgggcacctgtagtcccagctactcgggaggctgaggcaggagaattgcttgaacccgggaggcggaggttgcagtgatccaagatcgcaccactgcactccagcctgggtgacagagcgagactccgtctccaaaaaaaaaaaaaaaagagcccagggcagactgcaagaagcccacatgcagggtgaggaagagctaggccagctcaggtcatcctagggaaaactcttagctgtccatggaacaggtgactgagtgccatcagagttagggagagggtgggctgaggagaattattcctcagtttgtctccaggtgcatccccctgtagacttaagccccccacagagagatgggtagcataacaagtgaaagaaccaagtcggggattgtggctcgtgcctgtagtctcagctgcttgggaggttggggtgggaggatggcttgagcccaggagtttgtgtctgccctgggcaacacagctttattaggaaaaagggaaggggaaggggaaagggaagggagagagaggaaggaagggagaaagagacagagagaaggagagagtgagagaaagaaaaggaaggaaggaaggaaggaaggaaggaaggaaggaaggaaggaaggaaaggagggaggaaggggaggagaggggaggggagggagggaggaaggggaagggaagggaaggaaggaagggaagcgaaggaaggaagggaagggaaggaagaaggaaggaagagagagaggaaagaaggaagaaagaaagagaggggagggagagaaaaggagagaggaaggaagggagggagggaaggaaagaaggaagggagggaaggagggaaggaagggaggaaacgagggagggagggaaagcgggagagagagagagagaaagaaaagaaaagaagaaggaaggaaggaaggaagaaaggaaggaaggaaggaaaatctaagagaatagaaactcaggataatgattttggttttggggtttttttgtttagctttattttctaaattttctttgagatgaagtcttcctctgtcacccaggctggagtgcagtggcacaatctcggctcattgcaacctccacctcccaggttcaagcaattcttctgtctcagcctctccagtaactgggactacaggttcacgccaccaggcccagctaatttttgtatttttaatagagatgggatttcaccatattggtcaggctggtctcgaactcctgaccgcaggtgatctacccacctcggcctcccaaagtgctgggattacaggcatgagccactgtgcctggccattttttttttttttttttttgagacagagtcttgctctgtcacccaggctggggtgcaatggcacgatctcagctcacaacaacctctgcctcccaggttcaagcaattctcctgcctcagcctctcaagtaactgggactacaggcgcatgccaccacgcctagctaatttttgtatttttagtagaggcagggtttcaccatgttggccaggttggtcttgaactcctgacctcaaatgatccgctcccctctgcttcccaaagtgctgggattacaggcatgaaccactgcgccgggcctttttttttttttttttttttagatgtagtttcgctcttgttgcccaggctggagtgcaacggtgcgatctcagatcactgcaccctccacctcctgggttcaagtgatttttctgcatcacactcccgagtagctgggattacaggcatgggccaccatgcccagctaattttgtatttttagtagacacggggtttcgccatgttggtcaggctgatcttgaattcctgacctcaggtgatccacccgccttggccttccatagtgctgggatcacaggcgtgagccaccatgcccggcccatattttctaaattttctacagtaaacctttgtacctaataagaggcactttgctaggtactgagagtgcagtgttgagcacatattaattatcttgtttcttcaatagtgcattcgtttttgtattttattatttctgtcctacttcatttatggttttattcttttccttccttccttccttcctccctccctccctctttctgtctgtctgtctgtctttctttctttctttttactgttattttatggtttttttttgagacggagtttcgctcttattgcccaggctggagtacaatggtgcaatctcggctcacctcaaccttcgcctcccgggtttaagcgattctcctgcctcagcgtcccaagtagctgggatcacaggcacacgccaccacgcctggctaattttgtatttttagtacagacagggtttccccatgttggtcaggctggtctcgaactcccgacctcaggtgatcgcccacctcagcctcccaaagtgctgggattacaggtgtgagccatcgcacccagcctatttatttattatttatttttattttttgagacagagtcttgctctgtcacccaggctggagtgcagtggagcgatctcggctcaccacaacctccacctcctgggttcaagcaattctcctgtctcagtctcctgagtagctgggactataggggcccgccacttcgcccggctaatttttgtatttttagtagagactgggtttcgccatgtttggccaggccagtctcgaacttctggcctcaagtgatccacccggcttggcctcccaaagtgctgggattacaggcgggagtcaccgcacccagcctgttcttctttaaatctctttaacttgaaaggttagctttgttttcattttcaatctttaaaaaaaaaatactttaatactattaattttccttgaagtgtttctttagctacacatgataagttttgatatgtagttctcctattgtcatttaattataagtaatttatagactccattgtgagttcccctttaatctttgagggtataatttacagttacaaacatgtgtcgatcttcattatttgtagttctatatttatgaatgcacctactcactaaaattcatttgtaactccaaagtcagtgctcgaagtgcttttgtagtcattcgtggacactcgcagaggggtgaaacatgagtcactggatgcacatatgcatgttcccagctgtttcagctctcctactgtaaaaaaatacctttttgtgtatatttaatgccccatttttctcatttttgtggtttttgttgattttgctgtttaaaatagcctctaaggatgatgctgagtgctgtcttgcattcctaagcacaagaggctgtaatgtgccttatgtgggtttgatcacaagcatgagttacagtgccattggccatgagttcagtgctaatgaatcaacaacatgtatttcatatggagtttttaaacagaaatatacacaaaacaaggttatatattgactgattgatgaaaatattgtggccaaaggcttggaggaacccaaccctgtatttccactagaaacaatggttcagtattcactaattcagtgttttcagtgactttgtagaactaccacaaatgagaatggcatggctgtgtgtgtatatgtggtctttttttttttttctgagacagagtttcactcttggtgcccatgctggagtgcaatggtgcgatcttggctcactgcaacctccacctcccaggttcaaacgattctcctgcctcagcctcccaggtagctgggattacaggcaggtgccaccacgcctggctaattttgtattttttagtagagacgaagtttcaccatgttggtcaggctggtctcgaactcctgacctcaggtgatcctcccacctcaacctcccaaagtggtgagattacgggtgtgggccactgtgccctgccgtgtatggggcctttttattgttaatttataatttaattactttgtggtcagtgaatggttttcgtaacactgatctttttttttttttttttttttgagacagagtctcgctctgttgcccaggctggagtgtagtggtaagatctcagctcactgaaacctctgcctcctgggttcaagtgattctcctgcctcagcctcctgcgtagctgggattacagacaggccggcaccaccaagcctggctaattgttttgtattttcagtagagatggggtttcactatgttggccaggctggtcttgaactcctgacctggtgatctgcacaactcagcctcccaaagtgataggattacaaacatgagacaccgtgccctgcccaaagctgatatatttgttagcagattatttctcttatttatttatttatttattttgagacagagttttgctcttgttgcccaggctggagtgcgatgatgcgatcttggctcactgcaacctctgcctcctgggttcaagcgagtcccctgcctcagcctcctgagtagctggggttacaggcgtgcaccaccatgcccagctaattttggattttttttttttttagtagagatagggtttcaccatgttggtcaggctggtctcaaactcctgacctcaagtgatccacctgcctcgggctcccaaggtgctgaggttacaggcatgagccattgcgcctagccaattcgtcttattatcttataatgtctctcttttgtaatggttttccctttatcttctattttatatttatttatttatttttttgagacggagtctcgctctgtcaccaggctggagtgcagtggcgatctcggttcactgcaatctccgctaattgcaatctcctctaattgcaatctccgcctcctgggttcaagcaattctcctgcctcagcttcccgagtagctgggattacaggtatgcgccaccacgccggctaattttgtatttttagtagagacagagtttctccatgttggtcaggctggtctcgaactcccgacttcaggtgatccacccacctcagcctcccaaagtgctgggattacaggcgtgagcctccatacctggcaagtcatgtagggtctgacaatgaatataaaaggggttatttacataaaagtttgtgaagatattagcttagagaggcaagttaattatggtacttagagataaacaggcacatccttttatgtatatctagtgaagtcagttgctgtaatctattctgtttaaaaactgaactatactaggtctgaataacaagataatgtacatttcccctagaagataggaacgacaactcacacctgtgtgccattcctttttttcttcttctgatagtgattggacctccccaaacgacctaactcagaggaatttgggcatagtgtactagctttcttcccatgaaacatccctgtttgtgttgtatatttgaggtagtagcaacgtgattaagaatgtggactctaactggccaggcgcggtggctcacgcctgtaatcccagcactttgggaggccgaggtgggcagatcactaggtcaggagatcgagactatcctggctaacacagtgaaaccctgcctctactaaatatacaaaaaattagccaggcatggtggcaggtgcctgtagtcccagctactcggaaggctgaagcaggagaatggcgtgaacccaggaggcagagcttgcagtgagccaagatcgcgccactgcactccagcctgggcaacaggctcaaaaaaaaaaaaaaaaaaaaaaaagaatgtggactctagaatcaatcagttggctctgggttaaaatctcagccagctctactacctactagctgtttgagactgacgagtttcctcatctatttattttttaaaaaacagtaataacagtacttgattcacagggttgttaacattgagatgatgcatgtggactgttctgccagttttctggtatcccatggtgagtgctgtagctacggtgagcattgtgtgttataatcacaggtagtaggagatgggaaagcaggggccatgacaggaggccaatccagagaggttcgtgggttacaggaagaagacagataaggctatagcatgaagcatattagttcgaggaaggatttaaggtgcggaggccagatctgaaagtaatgaaacaactccagtgcaactgtttcataactggttctctttgattcttctagaaagccatgtcctgccaccgcagccagctcctctggttccgccgcctctacattatcttctcccggtacatgagaatcaactcactgagcttcctctgaagccttgaagggttttcagatccaaggaacaaaggggaaaatagacaaaggagtgcagaggacctggcctggcactggcttatttacctgagctcaaggagatccccgctggagcagcctctgcaaaagggagcccatgtaggccaggggctgtccaaactccagcttcttcccctgggaaaaaacccaaagaaccaaaaacaaaccaccccaaggataataatagctacactgctagcttctcaagttcttgtgaaaaacaatttacataatgacacagtagatgtggaacacctagcccagtgcctgggcaggtccctattatcataaatgaacataaaagtgctctaaaaacactccacagatgtgacttttacattgtttccaaagcaggttcaccaaaaacacatacacaaaatgcaacagtgtgtgttgaattggttcaatcataattcctttgatttttcttgtatcagaatgtgggtctaggaaaaacttgctctatttaacaggacagctctgattgaagcatccaagtacaggtcactggggtgggcactgttttatacagagacgattacaagaactctgcctcaaagagcttacaatcaaatatgtcagctctcagtctttttggagaagtaggaagtaggaagataaatctgagacttaaaaaaacacaaaacattcaagaacctgatgtcttaaaattgtcctacgaacaaaagctctctgaaagctctggcttggaaactactctcagaatccagctaacgctccagggaagtggcctgagtcagggaagctaagtggtgaagagcacaggctggtagtcctgcgattgaagccagaatgaccagctgtgtaaccaaaggcaaggtgctgaacctttctctgcctcaattctctcatctgcaaaatgggaaataataatgatcccaacctcagagaactgaacaagataatacatgaaggtgcatatcaaagagtctcacatgctctgctgggtaagtatgccctccacccgccacaggaaacactgaattgcttctccatagctgcaggttagagacctgcttgttcagacactccacctcaacttgccctcctttgcttagtgtcaccattatcttgaatgcctcctaggggccacataagactaatagagctattaggctctgaagccggaatcaaaaatgcaaatctggttatgtgatttgtctacttaaactttgtcaatagctcctaatagccttcatgtgaaaatgtgaccagaagcacgttactaacactggctagagtgcagtaggagagtgtggtaggacaggctgacccctgccctgttactaggaagacagacactcacccagcctttctgaacagcaactctgctaagagcttttaaaatatgcatattctatgacctaaggaatacttagaaaatcaaaattatatacacactggctgggcgcagtggttcacatctgtaatcccagcactttgggaggtcaaggagggtggatcacttgaggccaggagttcgagacaagcctggccaatgtggcaaaaccccgtgtctactaaaaatacaaaaattagccaggcatggtgccgcaggcctgtggtcccagctactcggaaggctgaggcacaaggattgcttgaacccagaaggcggaggctgcagtgagctgagatcgcgccactgcactccagcctgggcgacagagccctgtctccaaaaaaacaacaacaattatacacacaaagattatcattgtattatttataatagcaaaactggaaaaatccagtgatgcagttgtgttttgtaacaaggaagaacgttcacactattaaatttttaaaagcgggttaggaatagcacaatcccatttttgttgaataaatatatacacaagtatataaataaatacatatatatcaaaagatatatatccaaaagataaatactagctggcaaggtaatctttcaacaatgaacatttataattgtaaaggactttgttgttgttgtttatggatcatttggatgtgagaattttgatatcatgtgaagttttttaaaaagtgtgtttataggcccggccgcggtggctcacgcctgtaatcccagcactttgggaggctgaggcgggcagatcacaagtcaagagatcgagaccatcctggccaacatggtgaaacctcgtgtctactaaaaatacaaaaattagctgggcatgggggcgggcacctgtagtcccagctactcaggcggctgaggtaggcaaattgcttgaacctgggaggcggagattgcagtgagccgagattgcgccacagcactccagcctgacaacagagcgagactccatctaaaaaaaaaagtgtgtataggccaggtgcagtggctcacacctgtaatcccagcacttcgggaggctgatgcaggaggattacttgagctcaggagtttgaaaccagcctgagcaacatagtaagaccccatcttttcaaaatattttaaaattacccaggcttggtggggtgtatgtatagtcccagctactcaggaggctgaagtgagaagatcacttgtgcccaggaggtcgaggctgcagtgagccatgatcataccactgcactccagcctaggccacagaatgagactgcctcaaaaaaaaaaaaaaaaaaaaaaatatatatatatatatatatatatatatatatattaatcttagaggttagaaagatgaacaaaattatcaatatttgtttctggatggtgagacttaaaacatttcctgcctcttttgttttactgtacattccaacttttttgaaataattaagtagaagtcggccagtgcggtggctcacgcctataatcccagctacttgggaggctgaggcacaattgcttgaacccgggaggcggaggttgcagtgagtcgagatcacaccactgcactccagccttggcgatagagggagactccatctcaaaaaaataaaataaaataaaaataaataagatttaaaaaataaaaaaaagagggttgctgcatctgagactgcaggttctactctgggttctggaaagaggacagaccagaactaggctctccttggtaccagcagagagccaagggactgcagcacaggagggaaggaagcccctggaggccagttagggcagccactagcagtgccttcatgagaaaagtaccctccagattcaatgcagccctggggacacttgtcctggcaagaaaagagtgtcctcgtgcaaattatcaacaagtagtctttcctgcctgcaaacacactccctccccagggacagccacaaacagccttgtagaaggagcagagacttaagcatccacttagccagatgctcttgtttggttaacaacctgcaaaactaggcagcagtagccccaaagcctggagcaaaaatcagaatttcatggttccttgaaggaacaccaaaaaaaaaaaaaaaagaagaagagagagaatcctctcctccaactgcccaaatagaaaggatctcagtgaattaagaatcctctgggaggggcagcaatcccacttgctcagagacctggagagtgaccaggctggggtgggtgtgctgaagtcaggagagggtcaccccttgtcagagagacctgcaaacaatcccccacccaccccatcctcggcaagggctgatggtttgccagttctcacctcggtccagagagcagaaactgccaacttcaaccactccccgcttggctactactcagcagccctgactcattaagaaaacacaaaaatcgagagcaaccagacacaatacaaaaggggaaccctcacctgaggaggctcagaaggaggggaatagggcagatctcactgaagtagcaattaaatggaagagactttatcagaaacagtagtgaaagcccgggcactgacccagacaaaaaagcacacttctccgtggtgaccaaattagtaatgtggaatatcaagtagaagatatattgcagaacaaagaggttaaaaagccaagaaatggaaataagggtgggaaagagatttgaaaacacattaaggagagccaacgtgaataatggaagttccagaaggagcaaaagcaggaaggtaataaaggagaacttccgtaatctgaaggagactgagtacactgaaagagcccgccaaatcctaggcagctttgatttttaaaacagatgcacaaatatgctgcgaaattcctaaattcccagtgagaagggggagattaaagtattcaaaaagtctcctcttggggccagccaccgtggctcacacctgtaatcccagcactttgggaggctgagactggcggatcacttgaggtcaggagttcgagaccagcctggccaacgtggcgaaaccctgtctctactaaaaatacaaaaattagccaggcgtggtggcgcatgcctgtaatcccagctacttgtgaggctgaggcagcagaatcacttgaacccaggaggcagaagttgcagtgagccaagattgtgtcattgcactccagtctgggctacagagtgagactctgtttcaaaaaaaaaaaaaaaaaccaggccgggcgtggtggctcatgcctgtaatcccagcactttgggaggccgaggcgggtggatcatgaagtgaagagatcaagaccatcctggccaacatggtgaaaccccgtctctactaaaaatacaaaaattagctgggcatggtggtgcgcgcctgtactcccagctactcgggaggctgaggcatgagaatcgcttgaacccaggagacagaggttgcagtgagccgagattgtgccactgcactccagcctggcaacagagcgagacttcatcaaaaaaaaaaaaaaaaaaggtgtcctttgcggccaaggggaagctgggctgggggtaaagctgcatggtgcagggtgacaaatagacaactgatgggctgcagtctggattgtgaggaactgaaaggtatacagttccagagctgaaactaaaaagcatgggatctcaattaacaaagaggaaagcaggaaatgaagaaaaacttaaaagactgcaaaagtaagaaaaaaggaaaatagtataaaatgtaataaatataatagaagtaatacaaaaagaataaaatcagagctacttcaaaaaatatgaacaggctgaatttccagaccaaaacagactgtgaaatcaatgtgttagaaaacaaaatctagctacatctaaaagtaacaaaggctaaaaataaaaggatgaaccatataccatgtagcaggagaacaaaaagaaggaagagcaacaccagaaatccaggccaaacccaatatgacaccaagaagcattaaattggacaaagatgggtatgttaacaggttcactccatgagatgacaggcacccaacatcacagtagccagatacataaaacaaaacctcccagacatacaagacctttattaaaagacaaaaacaaacaagacaccacgataatagtaggaggcctcagtattcttccagaattttgaaaaattgagttggcaaaaaataacatcaaatattggaataaagcaaacattcacttatgtgatagaatgtttacaaaagttgactgtttattggccactgataaatccatttatttatttatttatttgagaccaggtcttgttctgtcacccaggcttggaatgcagtggtgtgataacagctcaccgcagcctcaaattcctgggctcaaggaaccctctgcttcagcctcccaagtagctgggactacaggcatgtgccaccacccccggttttttgtgggttttgtttgtttgtttgtttgaaatggagtctcactctgttgcacaggctggagtgcagtggtatgatcttgactcactgtccgccttccgggttcaagcgattctcctgcctcagcctcccgagtagctgggattacagatgtgcgccaccacgcccagctaatttttgtattttcagtagagacaggattttagcatgttggccaggctggtctcaaactcctgtcctcaggtgatctgcctgcctcggcctccgaaagtgctgggattacaggcgtaagccaccacatcctgccgttctttttgttgttgtttgtttgtttgtttgttttaatgagacgaggtgtcgctatgttgaccactttggcctcccaaaacgttgggactgcaggcataagccactgcacccagcagagaaatccctaataaattccctactgtagagatttaataggccacattcttggatcataattaaataacatgcaagtaaataataaaattactaaagagggggataaacaacacaactcagaaatcaagaagccccttcctaaataacccctagatcaaagaggaaatcaaaattggtattatgaattatctagaaagtaatacaaattaacacttgatgtgggatctgtatttaggtaatttgtagtcttaaatgcttaattttttaaaagattgaaaataagtgaactacatgattcaatttgagaaaatcaaaaatagaaaccaatagcaagagggacttaatagagatataagattagattaaataagtgaaaccaaaaaatagtggaaagaataagttttctttgaaaaatgaaataagccaatatactgcaagtctaattcaggaaaaaagaaaacaaaagtgcagttattgggaacagatggatatataaccacaaaagtgaaaaaggctgaaaaaaattataaaatattatatggcttgaggtcaggagttcgagaccagcctaggcaatatagtgaactaaaaatacaaaaattgcccagggaggttgaggtgagaggatggcttgagcctgggaggcagaggttgcattttgccattgcactccagcctgggtgacagaaccagaccctgtctcaaaaaaataataaaaaataagtgttggtgaggatgtaaagaaattggaaccctcatacattgttggtgggaatgtaaatgatgcagctgctatggaaaacagtttgatgttttcttagtaattttaacaaggatttaccacatgacccagcagctccactcctaggtacatttcccatagaatggacaacattcagacaaaaccttgtaaatgagtattcatagcaatattattcataatagcctcaaagtagaaacaactcaaatgtctatcaactggtgaataaacaaaatgcggcattttattattcagccataaaaaggaacaaagtcctggccgggcacagtggctcatgcctgtaattccaacaccttgggaggccaacgcgggcggatcacaagatcaggagttcaagaccagcctggccaatatggtgaaaccccctctctactaaaaatagaaaaaaattagctgggcgtggtggcacatgcctgtaatcccagctacttgggaggttgaggcaggagaattgcttgaacctgggaggcggaggttgcagttaactgagattgcaccattgtactccagcctgggcaacagagtgagactcagtcacaaaaaaaaaaaaaaaaaaaaaaaaggaacaaagtattgatgcatgctacaaggcaaatgaacttcaacagcattatgctaagtgagagaagccagacacaaaaggtcacctatgtaggattccacttccgtgaaacatttaaaataggcacattttgagatggaaagcagattagtagttgccagaggctagaggaagtggggagtgggcagtggctgctaatggtacagggtttctttcttttttaaaaacaattttatatattaaaaatattttaacatagggtcctgccttgtcacccaggctggagtatggtggtgtgatcatagttcactgtaacctagaactcctaggctcaaatgatcctcctgtctcagcctcccaagtagccaggactacaggggtgtgccatcacacctggctaattttgttttttaagagactgggtttcactatgttggtcatgaactcaaaaacactgaatactaaagtatactaacactgaattgtacacgttaaagggttgaattttatgttattcaaactgtatctcaattcaaaaattcacgtgaaaataagattgcattaaaatattctagttcactataaaagatatacacaagctaaatttgatgatcacgccgggtgcggtggctcacgcctgtaatcccagcactttgggaggctgaggcaggcgtattacgaggtcaggagatcgagaccgtcctggctaacacggtgaaaccccgcctctactaaaaatacaaaaaattagccgggggtggttgcagacgcctgtagtcccagctactcgggaggctgagtcaggagaatggcgtgaacccgggaggcggagcttgcagtgagccgagattgccactgcactccagcctgggagacagagcgagactccgtctcaaaaaaaaaaaaaaaaaaatctgatgatcgctttctgcacctagtgatactcacctaacacactagcccattaaacacaaatactacagaatacaacatttgttgttattttgaacaacttttagtgcttcctgtttttcttttaacagtttttaaaagataaaacgaattaatgcagaacataaaacaagaattgaataaatggagagttgtgccatgttccttgatagagatttaaaaatcctcatacagttcatatataaatttaatactacctatagcatctataaattccaatatagaaatttaaatatttacatatgtatttatatatgtatatttattcacattcttacaatgttaatatataaatttaatgtaattctagtcagaatatcaatggattatctttgggatttgaattaaattattttaaaaatatattagaaaagaaaatgtccaagtatcgccaaaatataaacatcaaaaaggatagtgacgtgaggcctgcctttctatatattaaaacttaggccaggtgtggtggctcacgcctgtaatcctagcactttgggaggctgaggcaggcggctcacgaggtcaagagttcgagacagcctggccaacatgatgaaaccacgtctctactaagaatacaaaaattagccaggcatggtggcgcgtgcctgtaatcccagctactcgggaggctgaggcaggagactcgcttgaacccgggaggcagaagttgcagtgagcctagtttgcaccactgtactccagcctgggcaacagagcaagactctgtctcaaaaaaaaaaaaacagcaacgatcccatgcaaaaggacgacaaatagcataagacagctaaggataaaccgaaccctacagcgtgctgttcatactgtttccataaagagaacagcataaaacttgaagagtgggaaagaacaaacccattggtgagccatattaccttcctggatgataaagcagtactgtacagaagtctgttctccctgaattaatttataaatgcaatataattgcaaccaaaatccaaacatgctttgattgcatgatacttgactcactaattctaaaattcatctgcaggacacagtgcacaaaaacagaataatatggccaggcaccgtggctcacgcctgtaatcccagcactttgggaggcctgaggctgacggatcacctgaggttgggaattcaagaccagcctggccaacatggtgaaaacccgtctctactaaaatataaaaattagctgcgcatggtggacacacctgtaatcccagctactcaggaggccgaggcaggagaatcgcttgaacctgggaggcggaggttgcagtgagccaaggtcgcaccactgcactccagcctgggcggcagagtgagactccttccccaccccccaccccacaaaaaaagtgtaatatggcaggatttaccctattagattgtttaaggcacattataaagcttggggatttaaaataatttgttatttgtggaactacaaaaaaatagatgaaaagaacaaataagagtccttaaaaaccctgattagtatatgtaacattttaaataaatgaagaatggatggattcatcaataaagtgttgagccaccagttatccaatttgaggataccattcacaaaatttagaggaagaaaaaaaaaacccacacacaaatccaggtagatcaaagaactatatgtttaaaaaacaaatagccgggcgtggtggctcacacctgtaatcccagcactttgggaggctgaggtgggtggatcacaaggtcaggagtttgagaccagcctggccagcgtggtgaaaccccgtctctactaaaaatacaaaaaattagccgggcatggtggcatgtgcctgtagtcccacctactcaggaggctgaggcaggagaattgcttgaatccagcaggtggaggttacagtgagctgagatcgcaccactgcactctagactgggtgatagagcgagactccatcttaaacaaacaaacaaaaccaataaacaaacaaaagtcagtaaaagtagtagaagaaaatacaagtaaatatgtttataagcttgggtaaggaagaattttttttttttttttttttgagacagagtcttgttctgtctcctaggctggagtccagtggcttgatcacagctcactgcagccttgaattccttggctcaagctatcatcccacctcagcctcctgcatagctaggactcaggcatgtgccatgctaagctaattttttatttatttttaaaattaattaatttttttttttttgggacagagtttcactcttgttgcccaggctgcagtgcaatggtgcaatcttggctcgccgcaccctctgcctcctgggttcaagcgattctcctgcctcagcctcccaagtagctgtgattacaggtatgcaccaccatgctaggctaattttgtatttttagtagagatggggtttctccgtgttggtcaggctggtctcgaactcccgacctcaagtgatccacccgcctcagcttcccaaagtgctgggattacaggcgtgagccattgcgctgctaagctaattttttttttttttttttgagacggagtctcactctgttgcccaggctggagtgcagtggcaggatctcggctcactgcaagctccacttcctgggttcacgccattctcctgcctcagcttccctagtggatgggactacaggagaccgccaccactcccggctaatttttttgtatttttagtagagacagggtttcgccatgttagccaggatggtctcaatctcctgacttcatgatccgccctcctcggcctcccaaagtgctgggattacaggcgtgagccaccacgcccggccctgctaagctaatttttaaaatttttttgcaaatatgaggtctccctgtgttgcccagtttggtctcaaactcctggcctcaagtggtcttcctcatttggcctcctaaagtgctgggattacaggtgtgagccaccacgcctagtcccagaaagatattctcaaaaaagaaataaatcacagccggctgcggtggctcacgcctgtaatcccagcactttgggaggccaaggcgggcggatcgcaaggtcaggaattcaagaccagcctgaccaacatggtgaaaccctgtttctactaaaaatacaaaaattagctgggcgtggtggcgcacgcctgtaatcacagctactcaggaggctgaggcaggagaatcgtttgaacccgggaggcagaggttgcaatgagccgagatcatgccattgccctccagcctgggcaacagagaccgactccatctcaaaaaaaaaaaaaaaaaaaaaaagaagaagaagaagaagaaaaaagaaataaataaatcacaaaaaacccagaaaacccaagtcagagagccactaagacaaaagaaaaaaaaaaaaaaagactaatgaatttgactccatcaaaaattaaaactcagccaggtgtggtggctcatgcctgtagtcccagcactttgagaggccgaggtgggtggatcatgagttcaggagttggagaccagcctggccaacgtagtaaaaccccgtctctaccaaaaatacaaaaaaattagctgggcgtggtggtgggtgcttgtaatcccagctacttgggaggctgaggcaggagaattgcttgaactagggaggcagaggtttcagtgagccaagtcacgccattttactccagcctgggcaacaagagcgaaactccatctcaaaaaaaaaaaaaaaaacccaaaaaaacaaatgcatatctttcagctcagcaatcccacttctctattctcaaataatacacatatgtatgtataaagaggtgtgtacaagaatgttcactgtcaacactcttggtaatagcaaaaaactgtaaacaatcataatttccgtgaaaaaaagaatagctaaataaactacacccacactatgctgttctatgcaacagttaataatgaggatatgtatattgatatgaaaagatcaagatgtaattaaataaagaaatgcaaccgaatgcagtggctcccacctataatcccagcacttagggaggccaaggcaggaggctcacttgaggccaggagtttgagagcagcctgggcaacatagcatgaccccatctctacaaaaaattttaaaaaattagccagggggtggcacacacctgtaggctgtggtaggactgcttgaagtaaggagttcaaggttacagtgagctgtgatcacatatccctaaaaaaaataattttttttttaagacggagtcttgctctgtcacccaggctgtagtgcaatggtgcgatcacagctcactgcagcctcaacttcccgggctcaggtgatcctcccacctcagcctcctgagtaactgggactacaggtgagcaccaacacacccagctaattttttttactttttatttacttatttatttatttatttatttattttttgagacggagtcttgctgtcacccaggctggattgcaatggcacacaatcttgacttactgcaaccaccgcttcccaggttcaagcaattctcttgcctcagcctccttagtagctgggattaaaggtgtacacaaccatgcccggctaatttttgtatttttagtagagatggggtttcgccacgttggccaggctgggctcagactcctgatctcaggtgatccacctgccttggcctcccaaagtgctgggattacaggcatgagctaccgcgcccagcctgattttttgtatttttagtagagacagggttttgccatgttctcccaaagtaccggaattacaggtgtgagccaccgtgcttggcccctgtataattttaaaattaaaaaaaattaaaaatacctggagttctggcctcgaaaatcccatccttgtgcgtgctgcttccagtcttgaagagtgaacctggccatcagtgattctgaagagacagtgaccacatagaacccagcacagcaaactgagaaactgccatttttattgtattttattgtttcctgtagagatgggggggtctcactacattgcccagtctggtcttgaactctagggcttaagcaatcctcctgcctcagccttccatagtgctgtattacaggtgtgagccaccatgcctggcctggccatctgtattttttttgtttgtttgttttttgtttttgagacagagtctcactctgtcttccaggctggagtgcagtggcatcatctcagcttactgcaacctctgcctcctgggctcaagccattctcctgcctcagcctcctgagtagctgggattacagatgcccaacaccacgcccagctaatttttgtatttttagtagagacgaggtttcaccatgttggccaggctggtcttgaactcctgacctcaggtgatccaccggtcttggcctcccagagtgctgggattacaggtgtgagccaccacactcggcatttttttttaattttttttttttttcctcagagacctttgttctgagatctttattccctctccctgttctttttccttgtctagtctacctcacaaatcatttcatgagtaatttccctaaagcaaagagcaaatatttattaagcatttgccattatttgtactcagtatttggtaatggcaggaatgtttgaggaaagctaatatgttagtaatatggagcaatgtgaagttaagaagagagggagatggcaaccaatcagaagactatatgaggccaggctttattcatcctgttcagaggtggtcacagcttcccaatgcctgcaaaataaaggccaaattcctgagcctaatatccaagaccatccagtctatcctcaacatacctttctgatatcttcattacttcttcccattaaaagcctccaattcagccaattttttttttttttttttttttttgagatggggtcttgctgtgtctcccagggtggaatgcatgacaccatcatagctcactgcagtctcaaaactcctgggctcatgtggccctcagcttcctaagtagctgcaactacaggtgtgcaccaccacatgcagcttcagcctggcttttgcatgtgtgcgtacctgttcagttacttctcctgtctccttaaaccttgcttcctttattgattgattgattgaatgattgattgagacggagttttgctcttgttgcccaggctggagtgcaatggcacgaactcggctcactgcaacctctgcctcccgggttcaagcaattctgcctcagcctcccgagtagctgggattacaggcgcccgccaccatgcccaactaatttttgtatttttagtagagacagggtttcaccacattggccaggctggtcttgaactccagatctcaggccatccaccagcctcggcctcccaaagtgctgggattacaggcgtgagacaccatgcccagctgaaatcttgcttcctttaaaaataggatcaaagttgttgtttcatgggtacagagtttcagttttgcaaggtgaagagttctggagatggatggcaatgatggctacacaacaatgtgaatgtacttaacactgctgaattgtacacttaaaaatggttaaggccaagtgcagtggctcatgcctgtaatcacaacactttgagaggccgaggcaggaggactgcttgagcccaggagtttgagaccagccggggcaacatggagtgaccttgtctttacaaaaaatattagccggatgtggtggcacacacctgtagtcccagctactccagaagctaagaggggggagatctcaagtctaagtcaaggttacagtgagccatgttcatgtattgcactgcagcctaggtgaccgagcaagacagtctcaaaataactaaagagagagattctgtctctaaataaattaacagtttatggtaaattttatgtgtattttacaactgaaaaagaaattagaagctgatttaactttttaaagatagactcaaatcgtactctcctcaaggcttccctgagttctctcctttgaactcttagagctcttattatctttacagctcacatggattgtaaccattcacaatttttttttttttttttttttttgagacagagtctttttctgtcagccaggctggagtgcagtggcgcaatcttggctcactgcaacctctgcctcctggattcaagcaattatcctgcctcagcctcctgagtagctgggattacaggcgcccgccaccacgcctggctaatttttgcatttttagtagaaacagggtttcaccatgttggccaggctggtctcaaacacctgatctcaggtgatccacctgccttggcctcccaaagtgctggaattacaggcgtgagccacagtgcccagcctttttttttttttttgtagatggagtctcgctccatcacccaggctggagtgcagtggtgcaatctccactcactgcaacctctgcctcctgggttcaagtgattctcctgcctcagcttcacaagtagctgggactacaggcacatgccaccatgcccagctaatttttgtaattttagtagagacggggtctcaacacattggccaggctggtcttgaactcctgacctcaagtaatccacccgcctcagcctcccaaagtgctgggattacaggtgtgagccaccatgccctgccacaatcttccatttttaataattgtttatcttatgtcttctttccaatttagctacacatttttttcttttttcttattttttttttgagacagtctcattctgccacccaggctggagtgcagtagcacgaacacagctcactgcagccacaacctcctgggctcgatcaaccctccggagtagctggaactacaggcttaagccacaatgcctggtggcaaacatcttgatagtgctgagtatatatctgctattaatcgactggcctcagaagcaaatcacagtacaaaagaaatgataaaccaaagtgactgctttaatgttaaaaatatttattttttttcctaaaagatcacacaaaagttgggaagagaaggatgtcaattagactacatcaaaatctgggcagagggaggacaaagagctgcctaaagaaactggtagctggagcaaactgcagagatcaagatgaccctagtcaacggaaccagcagcccaggtcagccacattcaggagcaccaccgaggcacggcagggagagcaaagttgctggccccaatcattcctccttttcagggcaggagaggcagaagctcactctttagacatgttcttgatggtcttgtgctctttcatggccttctcccaatcgctgccattgaattcctcagtgaccatactccgcacagtgccctcatccaggcagtggggggcaattcctacgagaaagtggcacagacaaagggggatcctcagtatgggtgagaccagatggtgtaccggctcctggataagcccccacctgcaggcatcatcacgctacacattagggcttccaaaggatatgccacagcttatggcttcagtgatgagacccacaggctgccagctggctcggaaagcactggctccagcctaccgcttcagccctctgactcactttcctcaactgccagatgggaatcacactccctgagccaggtttggccaaggctagacaacattcaataccaagttgagagtacaacatgcagaaaggcacagcccagagcaatctctgactggcagcctgaagaattcacaggcctttcctgtgtttagatagataactttctttccttttttttcagatggagtttagctcttgttgcccaggctggagtacaatggcgtgatcttgactcactgcaacctctgccttacgggttcaagtgattctcctgcctcagcctcccaagtagctgggaatacaggcgtgcgccaccaagcctggctaattttgcatttttagtaaagatggggtttctccatgttggttaggctggtctcgaactcccgacctcaggtgagccaccatgcctggcctcagatagataactttctaagaattaaatgtcttcccatttgcacaggatttcatacttttcaactctttcctgttctgcaaggtagacaggaaggagtctccatgtgacagatgaggaacaggaggccctgaagcaatgggggagcggtaaggatgacatcctgccctgccctgcctcccccacctcccctgtccgctccccaccaccataaggcaaaagacactgacagtcatagctgctctcgcagctctggaggctgcactgacacaacaagagtcctcagaacatcttccacctctgctttccccttcaattcacactatagttggtatgattctcaacaactgtcagagggttagttttattactccccagacccaagcaggccctgaagcggggcttggagggttccctgcttgtttattattttttaaaaagaacagagatacggttttgctatgtttcccaggctggtctcaaactcctgagctcaagaaatcctcccaccttggcctcccaaagtgctgggatacaggtgtgagccaccgcagccagccagtcctgcctaatttttgaacaaccaaaaagctttcaaatgccattatcaatgctccccaatcttgcctccttcactcccttaacccctgtcattattaaagctgcctcccctggccccacaagcccatctcctcacccctctcctccctacccttcaacaccatccccagcaacaccagctctaccagcaccagtgaataagaatcacaacctggatgggctccaagtccaacttcaccacattcagatatgggattcagaaaagtttcaccggagcccgactcacattctatcatgtggaaagcgctctgctgaggagccctgttcctctaagatacgcatgtgacagggtctagtcagcatcccacctgtccaaataagactttaaatgagagcaccatgggcctctctgtgtccccctgagcttgcagtccatcccctttactcaccgaagcctccggggtttgatcgtggagtatagaagctctgaacgccacatctcttacagaaggtatgctgggctttgtgagtattgaacgtgtaagtcgttatgtgctcagctccctaggtgaaaacagacaaacggtattcttttttacaaagagatttatttatttaatttatttatttatttatttattgagacagagtctcccactgtctctcaggctggagtgcagtggcgcaatcttggctcactgcaacctccacctgcatgggttcaagagattttcctgcctcagcctcccaagtagctgggattataggcgcgtgcccccatgcccagctaattttttgtatttttagtacagacagggtttcaccatgttggccaggttggtctcgaactcctgacctcatgattcacccaccttggcctcccaaagtgctgggattacaggtgtgagccactgcgcctggccccaaagacatttatttttatgtcacttaaaaaatacacctttgtagccgggtgtggtggcaggcgcctgtagtcccagctactcgggaggctgaggcaggagaatggcatgaacctggaaggccgagcttgcagtgagccgagatcatgccacggcactccagcctgggcaacagagcgagactccgtctcaaaaaaaaaaaaaaaaaaaacacctttggccaggcatggtggctcatgcctgtaatcccaacactttgaggccgaggcaggcggattgcttgagcccaggagttcaagaccaacctgggcaacatggcaaaaccctgtttctacaaaaaaatataaaaattagccaggtgcagtggcacacatctgtagtcccagctacctgggaggctgaggtaggagcatcagttgagcctggggaagtagaggctgcagtgggctgagatcgcaccattaaaaaaaaaaatcttgaaataacttaatggcaggagctcttctgtagggctctttgtactaagaggccatttcctatctccagaagagactgggaccttcttgaggacagagacccatctacactatccagagacatgtcagtctggagcgtgacagctcacagcttcccttaggtcaacggcatacagaattcagccttgagccttccctgatacatcacatcagggagggaaagtgcttgcttcccagggcctatgtggagagacagttcacccaagggactggctctccatgtccccaaacagaacggctcaaggtcttaagaaaactgatggctgtgcttaatttatccacaaaggacaaaccaggaaaaaaatatttgccagacgtcatagacaggctaatttccttaatggataatacaaacgggagactggacaaaggacatgaacggacagttcagatagaaagaaaaataaatcactctttagcctatgaaatgctcaccaaaggaacttcaatgagatgtatttcactgtcaggtgggcaaaatcaaagccgttaacatggtattgacaagtatgtagagaaatatgtgctcacatatatcagtcacaggaacaggaattggtacaatttagcaacatctaccaaaattttaaagtgtacatatgctttagcacacaattccatttcttgaaatttattatacagatatattccaaatgtctcaatgacataggtatatagatactatagcactgtttatgaaggctaaagattggaaaaattgaaaatgtccctcaatagaggaccggttaggcattatggacactcataaaatgaaatattctccaacttttgagaagaatgagacagctctacaaaactaacatggaacaattgccaaagttacaaagtaaagcaaggtataggccaggcgcagtggctcacgcctgtaatcccagcactttgggaggccaaggtgggcagatcacttgaggtcaggagttcaagaccagcctggccaacatggtgaaaccctgtctgtactaaaaatgtaaaaattagccagatgtggtggcgggcacctgtagtcccagctactcaggaggctgaagcaggagaatcacttgagcctgggaggcggaggttacagtgagccgagatcacaccactgcactccagcctgggcaacagagtgagactgtctcaaaaaaaaagttaagcaaggtataaaacaacgtacgtggtatgctaccatttctttttttttttttaaggctatatactggtatgtgtggtgtttttgttttgttttgttttgtttttttgagacaagatctcactctgttatccaggctggagtgcagtggtatgacgacagcttactgcagccttgacctcccaggatcaagtgattctcccacctcagcctcccgagtacctgggactataggcatgcaacaccacacctagccgattttttattttttgtagacatgggggtctcgctatgttgtccaggctggtgttgaactcctgggctcaagtgatctgcctgccttggccttccaaagtgctgggactacaggcatgagctactgtgcctggcctgtatgtgcttttatatgcatatgtatctttgaagagggatccaagaaacagtggcttacctttagggagagaaatcagacagctgaaggggaaggggtggaggtttcttatccttgttaaccctctttacgcttccccagccataccgtccagaattgtgcttcctatagaaatagctccctgaggagccttgctcactccatagccactgcagcacagaaaagcagcgaaggactgccaagtggtcccaagccatccagcattatctggatggaattaaagccccgcccaaccccacattacccataatgtgctaaaagtcttttttaaaaaatctgtattctttaacctggagattttctttctctctttttttttaactgctccttgtagagcagggtgtaggaagtgtgcccagaatagccagagaacttatttctaagagaattgatcctaaagaagaaatttctaaattgtcaaaaatgtataccaaggaggttcaccagtgttgttgataatcagaaaaaaacgggactcaactgcaatgatgcagagacagtgatggggtaagtagaccaggaaatcggctgtggggaagagggagactggggcatggggacagtagggaaagatttttcactgtgtatatacacattttcttctacctttcaaattttgtaccaagtacaaaaaattccccaaaataataaaattaaagttacaaataagtatataagcttttcattgggaaatgagataagcagtttatcaacaaaaagaatggtaaaattctacttaataaacataagacaataggtttagatgtatttctcagagtagaaaataatacacaaagacagacaccaaaatattaacagtggttacctttagttgacaggatttgggtgattttattgttttttgattctctgaatttgaaaatgtttccacaataccaaataggcctccaaaaaataaaggtaaaaaataacacaaccttttattttttattttcattttttttgagatggagtttcactcgtcacccaggctggagtgcaatggtgtgatctcggctcactgcaacctccacctcccaggttcaagtgattctcctgccttggcctcccaagtagctgggattacaggcatgcactacaacgcccagctaatttttgtatttttagtagagatagggtttcaccatgttggccaggctggtcctcaactcctgacttcaggtgatccatccatcttggcctcccaaagtgctgggattacaggcgtgagccactgtgccgggcccaccttttaaatgtcaacctgaaaccaaagcccgtgagaggccctgctatgctccaggcccctcccatgctacagacggcatgctaacagttgggtggggggtcctgtaaatctcaccaatgggttctgcactccttgaccctgctcttaagcactgaccttcaggagcttgaagcgagaagctggaacaatgaagtgtctattctgcttcttcttgcaaatgctgcaactacagaaagacagagcaaattccagattgtgagcagccacctgcatcctctatgcctgagcggcccagccatgagagccagccgaccccacagatgatgcccctttcagcaccatccagggccgaggagctggggcaaaggcctggatagcagtgcctctggtttgcaggtacagcagagcccaggggggtcccaagtcagcagtcgaggttctgcaatgctcagaacacaggaccaacagacaggtctgtactgcccacccctcagttctttacagtgaagagaagcgctggacttcagagacacttaggaaacaaatttcagacactgctacaacctgatgtctctgagacatccacaccaaaaatggacaaggaagtttaggtttccctctttcttcatcaccacgtcacaagaagtccagctccaagtaaaacacgtccccagaattaccatctctggaattaaactgaagtcccctcttttcaggccacctttgaaaaagttctaatttagcacagaatcctctcacaagttattccacagtgcttcttttccaatctggactctattgttagtagcctggtcagttctccatttgagtaattccatcgtatgtgcttattattcatatataattccggtacctaggggcaaaaaggactggatgctgttaaataattagctgcatgccaactttgggtcccaaagccagagcctgtcgtccctgctccatcataacgccggggaaggtggtacaaatcaggccctccacagccagcagtgccatctgcctcaaccgaagagcagagcgagagtggagggcctggggagcctccaggtgtatacaccctttactaacataccctccaactctccccaactctagacttctatgaagattctgcccaaggctttccactcagtacccagccaggcacacctgcagctaaccgcccccggctcctcagcagtgtcagtctgagggtgatgctgccacaagccacaagccctgaggaccctgctctgtgtcacctgggccatgctgttgaagctctgtgatgagccatataaaaggaacaaaaatagaacaatgaacctttctgtccccatcacctgacttcaacagttaccagcccaaggccaatgtttcctctgtaccccaactccccagattattttgaaatattgcattttaactctgaaattcttttaagccaatttagggaaaaaaaaatactcacttgcagtcaaatatatgcaagtctgctgaggcccaaacttcaaaacgaactgctccacagtggcagcctcctgtgtgcttcaccaggccctggtattcactaaatgaaacaaaaatcagaaagataataatttctgaatagctgcctcctgctctctttttgttgctgaaagaaagacagaagattagacaaaagtcttttctacatgacaaccagatgcatttctgcttttaaggaggcactgtcaatttcctaagtgaagaatggtttcagcaccttctttgtccatgagctctcttttcaccaatttcttaaattatattaagttgcaaaataaaacattccaaacatttcgaaaatgtgagggatcctaacccaccaccagacatttttatttatatgtcaaatactaaatttttttttttttttttgagatggagtctcagtctattgcccaggctggagtacggtggcacgatcttggctcactgcaacctctgccacctgggttgaagcaattctccagccttagcctcccaagtagctgggattacaggcgcctgccaccgcgccctgctaattttgtatttttagtagagatagggcttcaccatcttggccaagctggtcttgaactcctgaccttgtgatccacccacggggactcccaaagtgctgggattacaggcgtgagccactgctccgggcctcaaatactaaatatttttatgagctaggcacgaaggagagaacactaaacaagatacagcagacacgattgctacccttaccgaccttaacaatttactcaaataataattaattatgattgtgataaaggaggtacaggctgctatgaaaaataagactgtgtactcaatcaagtccagaggtccagaagagccttttgagaaacttaataaaggctcttatatttttgctctatttctttccagtattcttcatacacatgcgttttacatagttgtaatacacattacatagaattttttttttttgagagggagtttcattcttgttgcccaggctggagtgcagtgacgcgatttcagcccaccgcaacctccacctccagggttcaaatgattctcctgcctcagcctcccgagtagctgggattacaggcgcccaccaccacacccagctaattttgtatttttagtagagacggggtttctccatgttggtcaggcagtctcaaactccccacctcaggtgatccacccgcctcggcctcccaaagtgctgggattacaggcatgagccacctcacccagcctacatacaattttaaccctttaaagcttatatataagccaaactcagaaatgaacattaagatctgataaatgtcttaaaatcgctttccaaaaggattgaacacccttacccgataaataaatgagaaaacatttcactgtacagtctcaggcaataattataggaaaaatagctcactgcagttttaatttgcatgattaagactgatcattttttcatgtttctttacgtttatgtattttaattttttctgcacacataatgcttattgtaaaaactccaaacttcacactatttgagagtgctcaaagtgaaagcctcctgtaatctttacacccagagggatctacagttaattatttgttatatattcccccaaacttttttctacacaatattttaacgaaaatggtacagttatacacactttttgaatataatttagtagactttataagtacaaagtcatggcaatctagtgggagaaaaacagcttttttatgtcaatattttaaaactttttcttgaccatttatcagtttgtcttaaaataaaaatttatctcaaatttgagttttacattcttctttttttctgtatgccttgaagacaccatgagttttacattcctaaggatcttcgtattccttctgcccagaggcagccgtcaccctataggtgctcaaatgtttgatggatgaacgttttttaaaaattcagtgtgcagtccaagatgaaaaaccaaaaagtgaagcacacagaaaaccaaatatgtatcttctgtcggggacgactcatcctaagagaatttcttccgcaagaagctcaaaggaacatgttcaagaaaagaagtaattctcaggttatgcaattgctaggttattcttgtcggttttttccccctagtgttttgattgttctttttaattcgtaaaattgacactgaaatataatatcagggcgttaaaatatctctctgtagcacaactgttccccgaggcaggaatccagatcgcatttggagaaaagaaggcagccctttaacagcccagttaaaagctctttcccaaatcgcggacactcgagatgctcctcgggccatctaaaagactgcggagcagccaggagggcgagcggcagggagcattagctggctgagcacataaaagcctccctacgtaggtatccccgccgccgcgcgaggccggagcatctcttcgcgcgcgcttctctcccggatcaataacctccgccccctgctccctccctggcagtgcctggaacaatgacgggattttgcttcccagtgagttcaaaactattcatgcttccttcaacgcttctacctttcccttccacccaccctcaaaaacacgtgtgcaaacacaaaaaaaaaggggattcgggtaagagaaagccgtgggatttatgttcttttcactaagaaaggcccccacaccctttgcgcgccagcaagagacaacgtccccgagcacgatgcttatggccgggaaagactctttgtgtcccaagacggctgcgcgcgccctcaagctccggacgaagccccctttccattcccaggccacacagccctagaagcaccgccccgccccgccgcccttagaattaaggaataaccccagtgctaacgggggagccgcgtcggctccgtaacgtggaaggctcagagctgaaaggcgcccaaggcctgcacgcgggctgcgagcccgactcctgccgagggggtccgcgtggcaacggctcccgcgccccccggcccgccgcactcacaaggtgtctagcaggagcttggcggcaccctcggaggtaagcttctgccgcttctggaacgtctcccagcgctcccgctgctcgcccaggtccaggttggacgccgaggacgtcggggtcgcgggagtcggcggcggcggcggcggtggcgggagcaacgccagctcaggcggcggcggctcccccgggccctcctcctgggcccgcggcgacgagcgcctcagccgcggcttctccgacggcggcttctccaccgcctggctcttgctcccggcctggctagcggagcgccgtgtgcgggtggcgctgggtgccaaggcagcggccgcggaggccgcgggggccgcggaggccccggaccgcttctgcccgcgcagcttggcggccgcagagctcctcgatcgccgcatggctcccgcagcctggcgcgcaggcctcgcagcgcggcgcgcccccgccggcctgcgcgcgcccccgccgcccgccagtcttcaggcccagggggcgctgcgcccggctgccccgctccgccagccgcgccccgcagcgcggcgcctgcccgcaggagggagacccggcccgcccggccgctgggacgcacctgcctgttcagtcccgcaggcagaggggctgcgcctgggcctacgctcgcgatacccagaatccactcgcacctgcgaaggcgcccctgccctgtgtgaatccagcgggctcttcgtaccttcccgacctggaggggcctgggttgggcctgaattcgcaggctcatccgagcgggcagcctggggtaacttcgtctccaaaaacgagctaatttgtgtaaacggcctgccacctgctacctcctgtgtaacagcggccgaaaccatagttcttcaccttcgtcttttctgtcacattatagaacagtgtcatgaggataccaatagtcaacagatttggggtttcattttaattaaatgaatgacccgcgcgtcgaatttcattagtatgattttgatgaaggcagcaccaaagtttaaagacaaaaggcacgagaatcgttgatggaacccagatagtcttcttctccttctccttcttcttcttttttcagaccgagtttcgctcttgttgcccaggctggagtgcagtgacgcgatctcgcctcaccgcaacctccgcctcccaggttcaagcgattctcctgcctcagcctcctgagtagctgggattacaggcattcgccaccacacccggctaattttgtatttttagtagagacggggtttcaccatgttggtcaggctggtgccgaatactcccgacctcaggtgatccatccgcctcggcctcccaaagcgctgggattacaggcctgagccaccgggcccagcctatctttcttttttttttttttttttttttcttttttggagtctcactctgtcgccaggctggagtgcagtggcgcgatctcggttcacgcaacctccgcctcaccgttccagcgattctcctgcgtcagcctatctttcttctttattctgattttcttcatggtattgttagtttaatagtttattgaattaaaggcatagtttaactattttgtctttttttttttttttccatacaggatctgacagactggagtgcagtagcgggatctcggctcagtgtagccaagaactcctggcctcaagcgatcctgccgcctgggcctctggagtagctgagtagctggaacaacaggcggcgcccccccccccccccccccgccccagcgaattgttgctattgttgttttgtagataccgggtttccctatgttgcccaggctggtctctaactcctggcctcaagcgatcctcccgcctagttctccccaagtgttgggattacaggcgtgagccaccgagccccaccttgccattttgtcgttgttgttgttggaattatggtttacacacagcaacgtgcaaatatcttagatgtacagcttatgtgaccaccaccacttcagatacagaacattttcagcacaccagagtttccctcaggcaaaagaaaacagaggcgatcactgttcttttaccaccataggttggttttgcttattcttgaacatcattttaaaacggcacgtaggccgggcgcagtggctcatgcctaatcccaacactattgggaggccgaggtgctcagatcgcttgagcccaggagtttgagaccaggaggtggaagctgcggtgagctgtgattacaccaccatattctactctgggtgacagagtgagaccttgtctcaaaaaaaaaaaaaaaaaaaaaaagctgggtgtggggagtggttatccttgaggagaactaactgggaaagagaacaaaggactcttctaagatgctggatatggccaggcacagtggctcatgcctgtaatcccagcactttgggaggcggaggtgggcaggagtttgaaaccagcctggccaacatggggaaaccctgtctctactagaaatacaaaaactagctgggcatgctggcaggcacctgtaatcccagctactcgggaggctgagacaggagaatcgcttgaattcaggaggtggcggttgtagtgagccggaggttgcaccattgcactccaacctgggcaacagagtaagactccgtctcaaagaaaaaaaaagatactggatatgttctctacattatcttgatctgggtggtagttatggaggtgtgtaaaacacataaaaacacttcagtgtgtgtaagacttagctcaatttaaaaatgaagaacatggctgggcatggtggctcacgcctgtaatcccagcactttgggaggccaaggtgccggatcacctgaggtcaagagtttgagaccagcctgaccaacgtggagaaacctcatctctaataaaaatacaaaattagccaggcgtggtagcacatgcctgtaatcccagctattcaggaggctgaggcaggagaatcacttgaacccgggaggtggaggttgcagtgagctgagatcggccattgcactccagcctgggcaacaagaacaaaactctgtatcaaaaaaaaaaaaaaaaaaaaagaagaagaagaacaacaacataagttaggctattattttaaagacattatatcattaagtaggtttgaggtgaagaaaataattgaatagttattgcaaacccaaaactcaagaacgcaattaaaaaggcatgtgctggctgggcacagtggctcatgcctgtaatcccagcactttgggaggccaaggagggcagatcactgaggtcaggagttcgagaccaccttggccaacatggtgaaaccccgtctctactaaaattacaaaaaatagctgggcatggttgtgggcgcctgtaatcccagctactcgggaggctgagggaggagaatcgcttgaacctgggaagtggaggttgcagtgagattgcactccagcctgaaacaaaactccatctcaaaaaaaaaaaaaaaagaggccgggcgtggtgactcacgcctgtaatcccagcactttgggaggccgagacgggtggattactttaagtcaagagttcgagaccaccctggccaacatgatgaaaccccatctctacttaaaacatacaaaaaattagtcgggcatgatggtgcgcgcctatagtcccagctactcaggaggctgagacaggagaatcgcttgaacatgggaggcggaggttgcagtgagccaagattgtgccactgcactccagtctgggcgacagagggagactcgatctcagaacgatcaaacaaacaaaaaaggcatgtgctcggaacagtctgactctgggaatgaagttgagttgatttaatcatggcattggaaaatcaaggagtaactagaataagatgaaaattattcattaggctaactctcagaagactagaagtgaaaaactgaaaattaaaggaatgaggttaaggctatcaaattggaggaagtgagggattttcttagaaatatgattgatatagcatattacatcaggcttttctgtagaaattaacagccaattctatactttatgtggatatgcacatgacttagaagggccaaaacaatcttgaagaagaacaaatttggaggacttgatgtatctgatttcagaactaaggaaataagctaagtagtttaaacaaagtggaactggtctaaggataggtaagcagatcactggaacagaatggagggttgagacatggatccacatgtaatggatcacttgatttttgttgttgttgttattgttgttgttgttttgagatggagtttcgctcttgttgcccaggctggagtgcaatggcgtgatctcagctcaccacaacctctgcctcccggatttaagctattctcctgcctcagcctcctgagtagctgggattacaggcatgcgccaccatgcccacctaattttgtatttttagtagagacaggatttctccatgttggtcaggctggtctcaaacccccaacctcagatgatctgcccgcctcgggctcccaaagtgctgggattacaggcacgagccactgcgcccagcgatcacttgatttttgtttttgtatttgtttttgttttttgagatggtgtctcactcagtcacccaggctggagtgcagtggcataatctcggctcactgcaacctttgcctcctggattcaagctattctcctgcctcagcctctgagtagctgggattacaggcacccgacaccatgcccagctaatttttgtttttactagagatgaggtttctccatgttgcccgggctggtctcaaactcctggcctcaaactcctggcctcaagtggtccgcctgccttggcctcccaaagtgctgggattatagatgtgagccgccatgcccagccaacacttttaaatgaaaataattaataggtgaactttttaaaaattcaatctactttttttttttttttttttttttgagatggagtttcgctcttgttgcccaggctggagtgcaatggcatgatctcggctcactgcaacctccaccttccgggttcaagcaattctcctgcctcagcctcccgagtagctgggattaaaggcgcatgccaccacgcacagctaatttttgtatttttagtagagacagcctttcaccatgttgttcaggctggtctcgagctcctgacttcatgatccacccacctcagcctctcaaaatgctgggattacagatgtgagccaccacgcccggcccttatctttttctttatattgacttggaaaagttttctgtgttccctttttgccttctgttgatttggaaattctatcatttgtctctataatggtggtggtttcccttctcatatctagtagttatgataaaacctgtgttcctctagtaatgttgccaaattgatcaacaaatatgtttcccaaaatattttatccactcactcactccccaaccttcacctagaggaaaattttggaaattgagatttttagttcctcactttcccactgaaagtggaaaagtgcccagcctctctgaagtatactttcttttgaagactccttcatgaacatttacactttctatttcttatttggtatcataaccataagaccagctccaagaattgctgattacttttgttgttcttttgtgtccacagagccaagaactgagcccagtactcaaaatatttgttgaatgaactatctatttagatatatttattacaagatcaattgttcacaacaagcattgtgctcaccatctacccaatactgaggtctctttttattttattttactttatttattttttttgagatggtgtctcgctctgtcgcccaggctgaagtgcaatggcatgatcttggctcactgtaaactccgcctcccaggttcaagcaattctcctgcctcagcatctcgagtcactgggactagcggggtacaccactatacccagctaatttttgtatttttagtagagacgtagttgcattcaccatgttggccaggctcatctcgaactcctgacctcaagtgttccacccgcctcagccttccaaagtgctgggattacaggtgtgagctaccgcactccgcctgaggtctctttttaaatatgattagggattgattagataatttttttttttttgagactgaatttcattcttgttgcccaggctggagtgcagtggcacaatctcggctcactgctacctccacctcctaggtttaagcgattctcctgcctcagcctcccgagtagctggaattacaagcacccaccaccatgcccagctaatttttgtatttttagtagagacgggattttgccgtgttgtccaggctggtcttgaactcctcacctcgtaatctgcccgccttggcctcccaaaatgctgggattacaggtgtgagccactgggcccagcctagagaacttttaagtattttcctcaggtagggtgcatgggtgatactgggtacataagtgcttgaatcatctgcttttgccccaaaagatgaatgacattttgtctggggacagaattttttttgagacatggtctcactttgtcacctaggctgttgttcagcagcttgatcatggctcgttgcagccttgaattctttggctcaagggatcctcccacctcagcagcccctgtagctgggaccaccacgctcagctattttttcattttatttgtttatttctgtagagacagggatcttattattttgctcgggctggtctcgaactcttgggctagagtgattctcctgcctcagcctcccaaagcactgggattataggtttgagcctttttttttttttctccagagtctcgtttttgcagtggtgcgatctcagctcactacagcctccgccagcttggttcaagtgattctcatgcctcagcctctcaagtagctgggaccacaggcatgcaccaccatgcccggctaatttttatattttttctagagacagggtttcaccatgttggccaggctggtctcgaactcctgggctcaagcagtctgcccacctcagcctcccaaagtgctgggattacaggcatgagtcactgtgctggctggaaatgagttgtttgtttgtttgtttgtttgtttttatttttatttttgggactgactttcgctctgttgcccaggctggagtacagtggcgcgatcttggctcgccacaacttccgcctcttgggttcaagcgattctcctttctcagtctccccagtagctgggactacaggcatgcgccaccacacccggctaatttttgtatttttagtagagatggggtttcactatgttggccaggctggtttcgaactcctgaccttgtgatcctcccaccttggcctcccaaagtgctgggattacaggtgtgagccaccatgcctggctggaaggagaattctaatgctagttttgttttccttttatacaacagcctcttccttcaatgtgaaaacttgtgcacctctctcttttcccgtggaatttaggacttttgccaggatgtgtgtataggtatatatatttttattactcctgtctaggtggcctgataaagaagaaagataaaacaaaattacatttatatgttataaatgaaaaaatatataactagagaaacagaataaactcaaaacacttatcacaggatcttatatgctttcttgggtcctttggaaaatattttcatcatctgtattataccctcttagtaacatacattgagtttgggtaggttttgataagacttgctaaatcataacatctattttttttttttttctgaaacagggtctaactctgtcacccaggctagagtgcagtggcatgatcacagctcactgcagccttgaactcctgggctcaaggcatcctcccacctcagtcttccaaagtgccagaagccaccactcctgatttataacttttattcaatatatgctgttttctgaactaaaatgtcatatgtagacaatgaaaaacccattctgtagccattctaactgagcaaatttccctaccatatatgacattaaattcttcctgaatttaattagccaggcatggtggcgggcgcctgtaatcccagctactcgagaggctgaggcaggagaactgtttgaacccgggaggtggacactgcagtgagacaagatcgcaccactgcactccagcctgggcaaaaacagtggaacttcatctcaaaaaaataaataaattcttcctgaattcaaattcataaagacagaaagtagaatagagattgccaggggctgagggaggagggagtggggagttactgttttttgttttgttttgttttgttttttgagacgaagtttcactcttgtcgcccaggctggagtgcaatgatacgatctcagctcactgcaacctttgcctcctgggttcaagcgattctcctgcctcagcttcccaagtagctgggattacaggcgtgagccaccacaccaggctaattttgtatttttaatagagacagggtttctccatgtttgtcaggctggtgtggaactcccgacctcaggtgatccgcccaccttggcctcccaaagtgttgggattacaggcgtgagccactgcacctggcccgagttattgttaatgtgtttctgtttggggtgatgaaaaagttctggaaagagtggtgatggctgcacattgtgaatatatttactgccactgaattgtgcacttatatagttaaaattttatgttatacagcatatattttaccacacaaaaaaagaattcttcctggactttaaagcacaagcagaatgaataaagaaagaatgcctcatcatttgcacattgtggatggacaatacggcagcagagtcccaatatcgacgcccactcatgaaaatcaaaagtggtcgtttttgtacctagagtagtcaaatcagtagacaaaaagtaggatggtggttactacgggctgggcgtagggggattagggagttttttgttttggtttggtttttttgagaccgagtcttgctctctaggccaggctggagtgcagtggcccagtctcggctcactgcaacctctgcctcccaggttcaagcaattctcatgcctcagcctcctgagtagctggcatttcaggttcctgccaccatgcccagctaatttttttgtgtttttaggagagacggggtttcaccatgttggccaggctcatcttgacttcctgacctcaggtgatccacccgccttgaccttccaaagtgctgagattacagatgtgagccactgcgcccagccagaagttctttaatgggtatagagttagggaagaagaaaaaaattctggagagggatggtggtgatgggagcacaacagtgtgaacatacctaatgccactgaactgtacacttaaaaagagttaaaacggtaactttcgtgggttttttttgttttttgttttttgtttttgttttttttgagagatggagtcttgttctgtcacacaggctggggtgcaatggcatgatctcggctcgctgcaacctccacctcccaggttcaagcagttctcctgcctcagattcccaagtagctgagactataggagtgcaccaccacacccagctaatttttgtattttttagtagagatggggtttcactgtatggtggccaggctggtctcgaactcctgacctcaggtgatctgcccacctcagcctcccaaagttttgggattacaggtgtgagacaccgtgcccaaacttttgtgtatgtatgtgtttttcacaatttaaaaaataaaaaattttttttgagacagggcctcactggtgcccaggctggagtgcagtggcaagatttcagctcactgcagcctcgacctccccagctcaggggatcctcccaccccagccccccaagtagctgggaccacagatgcaggctaccacgactcattaattttttttgtaaatatggaattttgccatgttgcccaggctggtctcgagctcctgggctcaattgatccacccaccttggcctcccaaagcgctaggattacagacataagccactgcacccagctgaatttttgtttttgagtcggagtctcgctctgttgcccaggctggagtgcaatggtgcgatctcagctcactgcaacctgttcctcctgggttcaagcgattctcctgcctcagccccccgagtagctgggattacaggcatacaccaccacactcagctaattttgtatttttagtaaagacagggtttctccatgttggtcaggttggtctggaactcccgacctcaggtgatcctcctgcctcggcctcccaaagtgctgggattacaggtgtgagccaccacacccagcctgaaaaaaatgttcaagtgggcatttttggctccatcttaggcccctaaaaccaacatgatgaagtctctggtgactcaggataaggagaaacagatctagtatgtgatgtgttcacagaaggagaacagatgcaacactcaactccaaaggggaaaaaaatcctggtaaatctgtataggattttaagggaatctgaaaatggtatggcgtgtttgatttgcttttctctaaagcactgctctgtaagttcctatggggggggcgggcagagctgctagaaatacagaagcataagagagtaaataatggtaccttcatatgcaaatgtgcttttcagattggatctgtctgtgcttgttttgagctatacccggtaaggctccctccagaaacagaattcttgtttagctcctgggagtgtgcagaatccacaacagccactagggggcaggaggcatgtgtcatatataccgggcagtgagaaagagttaatgcaattaactaaggggcactattttgtaccctcaggcttgagaggccgccaagctactccagcctcatacaagtggggaaagactttgacggagtttagggtggactggcaggctctcaaccatagcaggagcactcaaatttctcagcttatgtggcaggcctcatttctttccctgatggtactatttatctcaatatttatatccctcttatcagcatgcttgtggtaaatgttatttttctcagcattttcaggggcaccactaacctttgtgccaagaagaaaacgaagcctctcctggacagacacaacctattaggcccagaacttggaaagctgcctgatgctgttaaaagttattcaataatacttgttaaaggacagtaagcaagactttatctgggaccatcaagatgggtataggaaccactgtaatgggattttgctataggggagagagattggactcaactctaaatacagcatgggcaagggggaatttacagccaagaagcagggtggaggtcagtggatggaaaattactaagaggagtaagggggattctggccaaacccacctaacaggactcttgctgaagacaggccaaggtgacccaacatcagctggaggatgatgggggatgagaaacctaatcagatattgaagatgatcagatatcaagatacagggttctggctaaaatcacttagaagagttcttttgctaaaactggatttataaggaagtgcacagatgggcctctggagaaggttcagaagcctgactgaagtttgtccaagcaaagaatctttgtcaatgcctctgagtgaattagaaaacaaaaatcccttcttcctgtgcagccctatgtggtagtcctgagtgtttactaagcaccaggcactgtgctgagatgaactttgcaaactttgtctaacagccttcacaaaaaggcaagcacttttattgtccacatttttctgctgagaaaattgagggtgagtgtaagtaactcactcagggtcacacagctagcaagtggtagagctcaaaacaaaaggatggataatgacctcagatgtcctgaacttcttcccacatccactgaactcaccagagtctccccccaccacctcccaaactacatcctcagggcagcaagagtgattttaactctttattgctatactcatgtatatcacgtacatgtagaattcaaataataagaagaatgtccaactatgacaagaaatggagctttatcaatttctctgatgtgccccatcatcccctcaccgctcctcaagaggtaaccacccttctgacttttgtgctcatctttatcacatataagtacatatatctaaataacatttagtctcatctggtttcttggggggttttttgagacagggtttcactctgtcacccaggctggagtgcagtggtgcgatcttgcctcactgcaacctccgcctcctggattcaagtgattctcctgcctcagcctcccgagagcctgggattacaggcatgtgccaccatgcctggctacttttatttaatttaatttatttatttatttatttatttatttatttatttattgagacggagtctcactctgtctcccaagctggagtacagtggtgtgatctctgcccactgcaacctccgcctcccgtgttcaagcaattctcctgccacaacctcctgactagctgggactacaggctcatgccaccacgcccagctaatttttttatttttggtagggatagggtttcaccaggttggccaggctggtcttgaactgaccaatctcctgacctcaggtgactggtctgcctcggcctcccaaagtgctgggattacaggtgtgaaccaccacgccctgccgtctcatctgtttttgaactcattataataagctaacaaataatgcatgcattcttctgagacttttcttttgtgattcatgcatattgatgtgtatcctagagttgatatgtattcattgttgcacaggatgaaccttctacaattgtccatttttctgttgatagaatatatgtttacagttattgctattctgaataatgccgatataaacattcttgttcatctctcctggcacacatgcgcaagagattctctagggtatgaggtgtttaaaaatcttttcagccaggcacagtggttcgcgcctgtaatctcaacactttgggaggccgagacaggaggatcacttaagtccaggaattcaacaccagcctaggcaacatagtgagacttctgttgcaacaaaaaaaaaataataaattagctgggtgtggtggtgcatgcctgttggtcccagctatttgggaagcagaggagggaggatcacttgagcctgggaaggcaaggctgcagtgagctatgatcatgccagtgcactccagcctgggcgacagagcaagaccctgcttcaaaaaataaatagtagaaaacatttaaaaataaaaatactttcaggcaatttgattatgaacatgtgacaaagtttcactatagtcttgctacaagaacaaaggcctctgacagactaagtcaaagatttctctcttggtagaaacaatgggggaaaatgactacataatcactgtttagactgtatacaaaagaaatgcctaattaaagatctttagactcttgactgacagctgataatcatcttcatgagtgggtatctagcttctcaggagaggtcttaattcgattagaaactatcaaaaaattgcttcaggccaggcgcagttgttcacacctgtaatcctagcactttgggaggccaaggcgggcggatcacgaggtcaggagtttgataccagcctgaccaacacggtgaaaccctgtctctgctaaaaatacaaaaattagctgtgcgtggtggtgcgcacctgtagtcccagctaggataatcgcttaaacccgggaggcagaggttgcagtaagctgagatggcaccactgcactccagcctaggcaacagagtgagactccatctcaaaaaaaaaaaaaaaattgcttaaattttttgttgtggggcagggtgggagacagaatctccttctgtcacccaggttggagagcagtggtatgatcatagctcactgtagccttgactcctgggctcaaggatccgcctgcctcagccaccaaatagttaagactacaggtgcatgccaccacatgaagtaattttttttaagttttgtggagatggagggtcttgctatgttgtccagactggtctcaaactcctagcctcaagtgatcctcccaacttggctttccagagcgctgggattacaggcatcagacaacattcctggcccaaatattttattaggaatactactgtcttccttgaggaggttatgaattacattacccaaaaatattccaccccaagccaggtttaggacaatttttcttttataataactgcagttggattgctgcatctaggatatgtgcacattcaattttgtttctaaaggggttataccagtttacagtcttgccagcagtgggagagagttcctattgctctacatcctacccaacacttgacattgtctgaatttttaattttattgggttttttttttctggaaatggggacctcactatgttgcccaggctgttaaactctcagcctcaagtgattcttccacctaagcctcttaaaatgttggaattactggtgtgagccaccacacctggctttaattttttttttttcccatatggaggttgtgaaatggcatcttgtcatgggtttatttaatttaatttatttatttatatattttgagggagagtctcactctgtcacccaggctggagtgcagtggcgccatctcatctcactgcaacctccggatcctaggttcaagagattctcctgcctcagcctcctgagtagctgggattacaggcatgtgccaccacaccaggctgatttttttgtttttagtagagagggtttcacatgttggccaggctggtcttgaactcctgacctcaggtgacccaccctcctctgcctcccaaagtactgggattataggcgtgagccaccgtgcccagccttacctttttaaaataatagtttggctattccaggtcctttccatttacatataaattttaggaacagcttgtcaatttctatttttaaaacaggccggacacagtggcttatggctataatcccaacaccttagtaggccaaggcaaaaggatcacttgacaccaggagtttgagactagtctgaacaacataggaagatacctcatctctacttaaaaaaaaaaaaaaaattagtcaggcaagatggcttatccttgcgtcctagctacttgggagggtgaggtgggaaatgcttgaaccctgaagttcaaggttgcagtgaactatgaatgtaccactgcactccagcctaggtgactcagtgagatcttgtcttaaaaaaaaaaaaaaaaaaaaaaaaagtcggccagatgtggtggctcacgcctgtaatcccagcactttgggaggccaaggcaggtggatcacctgaagttgggagttcgagaccagcctagccaacatggaaaaacctcgtctctactgaaaatacaaaattagctgggcgtggtggtgcatgcctgtaatcccagctactcaggggctgaggcaggagaatcacttgaacccaagaggcggaggttgtggtgagctgagattgcgccacagcactccagcctgggcaacaagagcaaaacttcatctcaacaacaacaacaaaaaattatttcctaggctgggcgaggtggctcacacctgaaatccccccactttgggaggccgaggtgggtggatcatctgaggtcaggagttcaagaccagcctggccaacatggtgaaaccccattgtgatggttaatactgagtgtcaacttgattggattgaaggatacaaagtattgatcctgggtttgtctgtgagggtattgccaaaagagattaacatttgagtcagtgggctggagaaggcagatccacccttaatctggtgggcatgatctaatcagctgccagtgaatataaagcaggcaggaaaacatgaaaaggagagatgggcctggcctcccaggctacatctttcttttttatttttgagacagtctcactctgtcgcctgggctggagtgcagtggctcaatgtcagctcactgcaacctctgcctctcaggttcaagcaattctcctgcctcagcctcctgagtagctgggattacaggtgccccccatgacacctggctattttttatatttttagtagaggtgggatttccccattttggccaggctggtcttgaacttctgatctcaggtgatctgcccacctcagcctcccaaagtgttaggattacaggtgtgatcatcaaccctggccccagcctacaactttctcctgtgctagatgtttcctgcccttgaacatcagactccaagttcctcagttttgggactgggactggctctccttgctcctcagcttgcagacagcctattgtgggacctcgtgatcatgtaagttaatagttaataaactctccattatgtgtgtatatgtatatatatacacacacacatatataaccccattatgtgtgtgtctacatatatatcctattagttctgtccctctaggagaaccctgattaacacacccatctctactaaaaatacaaaaattagccaggcgtgttggcatgcacctgtagtcccagctactcaggaggctgaggcagaagaatcgcttgaaccccagaggcggaggttgcagtgagctgagatggcgccactgtactccagcctgggcagcagagtgagacaccataaaaaaaaaaaaattacttcctgttgaccaggtctgaaaaaatttaaaaaaagaaaaaataataataataaaagaaagtcttttacttttacttactgagataccttcatgctcattgaggatttacctgagctatgtctaagactgctttgccagaggtttgtctaaattttttctagctttattggggataactggtatacagttaagttgcaggtatttacagcatataaacagatacatttctatatatgcttatacctgtgaaactatcaccataatcaagatgataaaacattttcctcaccactaaaagtttttcctgccttttataacccatcccatctcattactccttcttgcctccatcctcaagtgatcactgatctgctttctctttcatgagtttgcattttctagaatttgatatggaatgaaatcatatagcttatacccttttttggtctgggttctttcactcagcataattattttgagattcatctatgttatgtgtatcaatggttcatttctttttactactgagtagtattccattgtatatactacaattctttttttattttattttatttttttattattatttttttgagacagagtctcgctctgtcaccaggctggagtacaatggcatgatctcagctcactgcaacctctgcctcccgggttcaagcgattctcctgcctcagcctctcgagtagctggaactacaggtgcatgccaccacgcccagctaatttttgtattttcagtagagacggtatttcaccatgttggacaggatggtctcgatctcctgacctcgtgatctgcccgccttggcctcccaaagtgctgggattagaggcgtgagccactgcacccgtctataattattattattattattatttaagatagagtcttgctctgtcacccaggctgaagtgcagtggtgagatctcagctcactgcaatttccacctcccaggttcaagcgattctcttgcctcagcctcccgagtagctgggactacaggtgagcaccatcatgctgggctaatttttgtatttttagtagagacagggcttcaccatgttggccaggctgatctcaaactcctgacttcaagcaatctggctgcctcggcctcccaaagtgctaggattacaggtgtgagccaccacacccagcctacaattcattttttaatcacatgaacttattatgtgcccctctctttgcactggctgggggaaaaaaccaaaaacctcccccaaaaccctcctaaatctatggcctacctctagcaaaggaaaaacttcaaaaccagcattttgtatactaatctcattcctaactgcattttctcttttcctctccctttgtatatgttcctcgtccacttatctttattttattttgttatatatatatatttaattaagttatcttggatctcttctagaacaagaactaaatacaagtaaacaaggccaggcgcggtggctcatgtctgtaatcccaacactttgggaggccaaggcgggtggatcacttgaggtcaggagttcaagaccagcctggccaacatggtgaaaccccatctctactaaaaataaaaaaaattagccgggtgtggtggtacgtgcctgtaatcccagctactcgggaggctgaggcaggagaatcacttgaacccgggaggcagaggttgtagtgagccgagatctccccactgcactccagcctgagctatagagtgagactctgtctcaaaaaaaaatataaataaacaaataataaataaacacaagtaaacaatgctctgtttttatttgactttatcagttccttcctcctgctttctttagggatactggcttttgtacacttagcctacttacagatgctcatcatatcctgcttggacaaatgccacaatctctgacatgctgtaatctaatcttccttctaatcatctgctatgatgtcaccaagttatcattctaaaatagaaatctgatcatgtcattcccatgcagtacacaggaagaagtcttaagttcttaatatagcaaggcgggcccttcatttgtcgttcattcgttcaataaatatttactggctgggcacggtggctcatgtctataatcctaacactttgggaagccaaggcgggtggatcacttgagtccagcagttcaagacccgcctgggcaatttgacaaaactctatctctacaaatatatatatatatatatgaaaaattagctgagcatggtggtgtgtgtctgtagtcccagctacttgggaggctgagggtggatcccttgagcctgagaggttgaagctgcagtgattgtgccactgcactccagcctgggtgaaagagtgagaccttgtctcaaaaaaaaaaaaagattaattaaaaataaatatttactaagtgctgattatgtagaaggcactatgccagctggctatgtgtggagatatggtgataaactagatagacaaggcctgtaccctcgtggagtttacattctacttgggggaaaacaaagagatacgcaaccaatcaagcagtaaagttacggattggacaaatacaaaattgttttttttttttttgtgatggagtctcgctctgtcacccaggctggagggcagtggcgcgatctcagctcactgcaagttccgcctcccgggttcaccctgttctcctgcctcaccctcccgagtagctgggactacaggcgcctgccaccactccctgtatttttagtatttttctgtatttttagtagagacggggtttcaccatgttagtcaggatggtctcgatctcctgacctcgtgatccgcccgcctcggcctcccaaagtgctgggattacaggcgtgagccaccgcgcccagcctgttcttttttttgagacagagtcttgctctgtcactcaggctggagggcagtggtgttatcttggctcactgcaacttctgcctcccgggttcaaatgattatcctgcctcagcctcccaagtagctgaaattacaggtgcccactaccacgctcagctaatttttacatttttagtagagacggggtccaccaccacacctagctaatttttgtatttttaatagacatagggtttcaccatgttggccgggttggccgcctcggcctcccaaagtgctgggattacaggcacgagccactggcacccagcccaatacgaaattgttgagaaagaaataacccaggtgttgtgactgagtcaggagcagaggcggatgtcacagaaggtctttctgaggtggtaacatttattctgcctaaaacatgaaacagaaatggccatgagaagagttctaggcaaaggaaacatcggttgcaaaggtccacaagtgggaaaaaacctggtgtttcctaagaactacagatggccaggatggctggagatgacgaggctgctggagagttgagccctggctgcttcttccgtggaaaaccacaggcccacaagcagccgccctaaattccagctgtaaattgctccccattatttcctcaatactctatgctttctcatctttcacctattccctcctgccttgtgactgggtttctaaataacgccttctctgaaatgttctggttcccctccggccctactccagacagctaaatggcttcttcctcctctgtgcctccacagaagtctgtatgtgcctctgattggtctgtctcagtcagcaatcagttagctttttacacagctaatatttattgagtgctttcaatgtccagtatctgttctaagtactttagccgtattaatgcaaccatatgaggcaggtccatttaatcctcaaaaacttggccaagtggctcacacctgtaatcctagcactttgggaggttgaggcaggcagatcacccgaggtcaggagtttgagaccagcctggccaatatggtgaaaccctgtctctactaaaaatacaaaaatcagccaggtgtggtggtgcatgcctgtaatcccagccactcaggaggctgagacaggagaatcacttgaacccgtgaggcggaggctgcagtgagctgagattgtgccactgccctccagcctgggcaagtcagaatgagactgtatctcaaaaataaaaataaataaataaataaataaataaactctcgacatgaattaactcattgaattctccaacacctccttaaggtggatactcttagtcctcacagtgacccccttatgggcactaagaccatggttctcttgggcggagtccatatcctgtctcagtcagcaatccaaatgcctctcacacccagaacttgctcaacaaatgtctgctgactggatgaatgacctaatatctttctcttggctcaggattcaaacttcaagagcatacagtgcccaggaatagctggctggaggaatttacgataatggttgtaaaagcgttgtagtatatacacatcaatgagaacataacataaaggctgatttaatatgtataatcactgcatttcaaatgtgagataaacaaatttctctatgtatcagagattgttttatatatatatgcatgtatatatatatacacgtgtatatacacgtatatatatatacacgtgtatatacacgtatatatatacacgtgtatatatatatggtcccataagtgtaatctatgtttaaatgcaacacagctggccataaatctaatgcgtctcgctctgtcacccaggtcggagcgcagtggcataatcttggctcactgaaacctccaccttccgggttcaagagattctcctgcctcagcctcacaagtagctgggattacaggcacccgccaccacacccggctaattttttgtacttttagtaaagactaggtttcaccatgctggccaggttggtctcaactcctggcatcaagtgatctgcccaccttggcctcccaaagtgctgggattacaggtgtgaaccaccatgcctgatctaatctatgtttaaatgtcctattttggctgactgcaacctccacctcctgggctcaagcagtcctcccacctcagcatcccaggtagctaggactacaggtgcatgccaccacacccagctaactgttttgtatttttgtagagatggggtttcgccatgttgcccagactagtctcaaactcctgagctcaaggaattcacctgcctcagcctcccaaaatgctgggattacaagtgtgagccaccatgcccagccgtaacataactttctgacagcttgggaaattgctacagcaagcctcagtttcttggtttgttgactaggcttgagaattccctagaaaagtataggaaaaaataaaatctcagtatcccaaagggcagctctgaaaagagcaatggaaactaggcaaaaaggcaaagatttaagactcaccttaatttgacaaggtaggatgacatctagtccacatttttttctttacagataaggaaaccaaaggttaaaaatgagtaaatcaggctgggcacggtggctcacgcctgtaatcctagaattttgggaggccagggcgggcaaatcacaaggtcaggagtttgagattagcctgaccaatatggtgaaaccccgtctccactaaaaatacaaaaaaaaaaaaaaaattagccaggcatggtggcgggtgcctgcagtcgagctactcaggaggctgaggcaggagaatcgcttgaatcccgtaggcagaggtttcagtgagctgagatcacaccacttcagtccagcctgggcgacagagcgagactccgtctcaaaaaaaaaaaaaaaaagaaggaaattctgtcacatgctaaaacacggatgaaccttgaggacattatgctaaatgaaataagccagtccaggcatggtggctcatatctgcaatcccagcactttgggaggccgaggttggaaatcgcttgaactcaggagtttgagaccagcctgggcaacatggtgaaacctcatctctacaaaaaatacaaaaaaattagcctggtatggtgatgtgtgcctatagccccagctacctgtggggctgaggcaggaggatcacttgagcctgggaggtcgaggctgtcactacagcctcgttcgcaccaccgcactccagcctaggtaacaaagcaaggccctgtctcaaaaataaataattaaataaataagccagtaacaaaaagacaaatattgtacaattccacttacatgaggcattaaagtggtgaaactcagagagacaaaaagtagaatggtggatgccagggttgggaggagggggaaaagggagttattgttcagtatggacagagcttcagttttacaagatgaaaaagtgccagagatctgttgcacatggctgggcgcggtggttcacgcctgtaatcccagcactttgggaggccgaggcaggtggatcacgaggtcaggagatcgagaccatcctggctaacacagtgaaaccccgtctctactaaaaaaacacaaaaaaattagccgggcctggtggcaggcgcctgtagtcccagctactccggaggctgaggcaggagaatggtgtgaacccaggaggcggagcttgcagtgagccgagatcgcgccactgcactccaacctgagtgaaagagcgagactctgtctcaaaaaaataaataaataaataaataaataaagttttttgttttttgttttttgtttttgagacggagtctcactcttgttgcccaggctggagtgcaatgacacgatcttggctcactgcaacctccgcctcccgggttcaagcgattctcctatcacagcttcccaagtagctgggattacaggcatgcaccaccatgcctggctaattttgtattttagtagagacagggtttcgccatgttggccaggctggtttcgaacccctgacctcaggtgatccacctcctgtcctcaggtgatctggcctcccaaagtgctgagattacaggctgagccactgtgcccggccaaaaataaaggtttttaagtgcttaagcaaatcagggattatatggtatttgctatattacctccatctttcatgtatttatgtaatatttcatgataaaaatattgtagccaggcagagcaacttgtgtgtgtaatcccacctacttggaaggctgacacaggaggatcgcttgagcccaggagttggaggctgaagtaagctatgattgcaccactgcactccagcctgggcaatagatactctaaaatagataataaataaataaataaaaatgttaaaaacatttaaagtagctattttttgtatgtttgtatttgagatggagtctcactctgttgcccaggctggagcgcagtggcgtgatctcagctcactgcaacctccacctcctgggttcaagggattctcatgcctcagcctcccaaatagttgggaacacaggtgtgcgtcaccacacccggctaatttttgtatttttagtagagatgaggttttgccatgttggccaggctggtcttgaactcctgggctcaagagatccatctgcctcaccctcccaaagtgctgggattacaggcgtgagccactgcaatctgcccaaattagctattttttaatggatagatttctgtacttttgaggcctaacatgaaaacagtacagattttgctctgtgttcctttgggcattcaatatcaaagtttctaacttgcttgtaataaattaggagttcattatgtaattgtattgaaataaatagccaaatgtgaaatataaaggaattgacaaatcagagactaattccacactttaaatatcaccaaataatgtcaagaaaacaactgtgaacttttaattggaactatagttttctcacagatttttattaaaaggcatctagccaagtaaaatcacttagaatctcagaatcaatccccctttgtttcttttgaaggaactgccaaggcaaatagcatttgcctatggagatgaaatacagtactctactgtgtttttgctttgtgttttaaggctgtcacaaagtttcttttctccagttgaacaaaagagaagattgcattttagtcactgaacaaacatttattgagcacagtgccaagtattgtgccagattaccaaattcctaatcttaggttaccaaatgacctacttcgggaaaacattgaaccaggagcctgtataactaacttacagttctggcaactgctagaacttcccagtgaagtcattataccagtcatgagatctgccttctagctcaatctgcgatcaacatgtatgattcaggaggagctgctggttggtgaaacaaattcagaatcactgttaggctaacaaaaacgaaaatccatactttatataataaaataaacgttttataaactacctcccaagtcgttcaaaatcacttccaaaattatcttaaactgtttatttctatctcctgcttattcacatcagtagacagtagatcccggttttagttaatttaactgaaagctgtctaggtgttaactcatataccagctcatttgtcgacatagcttctcaacgttatgctcaggtatgttgaaatttagtaattagcgacctttctaagagatgtttacttaattgtattaatacacacatttctagactacttcttacattatgaaggttggtatcacgtgaaaaacagccaatttcatgtttacttccaccccacccccgtgactgtgccaggcaccaggatccaaacacatctgccttactcaccttccttgggttatctccttgcaggacgagtggccacacccagggtgtagggaaacccgttgcttggtcctagctggttaacctcacccttgcacaacaagcacgtcaatgggagcaggatcagctactttcttgtaggtgaattcccgtttttgaagtggggtttcggctccctaatctgcacttttttttttcctaccagtttggagaaacagctgggaagaactggatttgcaggtattgctggagccagagcgaagcccggccactgtcaccatgggctccagcctcgcctctctgggcctggtggtgagcggcttcagcaacaggtttccggtccccgcagagggtcccactctgaactcccgatttacagactgttctcgggccgtgatgaggattaagacaatgcaactaagagcactctgactacagaagcatgatttaaagctccacaaccctgcaataaccacgaagaaaaataaaaagcggctagtccgccaggcacggtggttcatgcctgtaatcctagcactttgggagcccgaggcaggcggatctcctgagcccaagagttcagtaacagcctgggtaacatagcaagactctgatctaacaacaaaaaaaaattagaccaggaacagtggctcacatctgtaatcccagcactttgggaggccgaggcaggcagatcacctgaggtcaggagttcgagaccagcctgaccaacgtggtgaaaccccatctgtactaaaaaatacaaaaattagccaggcatggtgacacgcacctgtaatcccagctactcaggaagctgaggcaggagaatcgcttgaaccagggaggtggaggttgcagtgagccacatcacgccactggccttcagcctgggtgacagagtgagactccgtctcaaaaaataaatacaaaattaaaaagccaggcgtggtccacggtcccagccacttgggaggctgaggtggcaggataacttgagccctggaggtcaaggctgcagtgaacggtgatcacaccactgcacaccagcctggggacacagccagactttgtcacaaaaaagcaaaaacaactggccagtgtatgaggggctcgtgttttttgtttgtctgtttgttgagacagagtctcactctgtcgccagactggaatgcagtggcacattctcggcccactgcaatctctgcctcctaggttcaagcaattatctgcctcagcctcccaagtagctgggattacaggcgcccgccaccacgcccggctaatttttttgtatttttagtagagacggggtttcaccaccttggccaggctggtcttgaacccctgacctcatgatccacccgcctcggcctcccaaagtgctgggattacaggcgtgagcctccgcgcccggccaggggcgcgcgtttttaaaacatgggagagggaattgtgcttcacaatcaccatcaggtgtctcgatatcgggtgccacgccgtcccgcttctgaggcgcggcggcccactttggcaggccgaggcgggtggattacctgaggtcaggagttcgagaccagcctgacaaacatggtgaaacccccgtctctactaaaaatacaaaaaattagccggacgtggtggcgcatgcctgtaatcccagctacttgggaggctgaggcaggagaatcgcttgaacccgggaggcggaggttgcgatgagccgagatcgcgccattgcactccagcctgggaaacaagagcgaaactccgtctcaagaaaaaaaaggaaagaccccccctccttctcccgccggaaataccctctttcaggacggcgcgcctgtgcggcgcacgcgcgctcagttacttagcaacctcggcgctaagccaccccaggtggagcccagcaacaacagagccaccgcgtcccccaccaatcagcgccgacctcgccttcgcaggcctaaccaatcagtgccggcgctgcaaggaagtttccagagctttcgaggaaggtttcttcaactcaaattcatccgcctgataattttcttatattttcctaaagaaggaagagaagcgcatagaggagaagggaaataattttttaggagcctttcttacggctatgaggaatttggggctcagttgaaaagcctaaactgcctctcgggaggttgggcgcggcgaactactttcagcggcgcacggagacggcgtctacgtgaggggtgataagtgacgcaacactcgttgcataaatttgcgctccgccagcccggagcatttaggggcggttggctttgttgggtgagcttgtttgtgtccctgtgggtggacgtggttggtgattggcaggatcctggtatccgctaacaggtactggcccgcagccgtaacgaccttgggggggtgtgagaggggggaatgggtgaggtcaaggtggaggcttcttggggttgggtgggccgctgaggggagggcgtgggggaggggagggcgaggtgacgcggcgctgggcctttccgggacagtgggccttgttgacctgaggggggcgagggcggttggcgcgcgcgcgcgttgacggaaactaacggacgcctaaccgatcggcgattctgtcgagtttacttcgcggggaaggcggaaaagaggtagtttgtgtggtttctggaagcctttactttggaatcccagtgtgagaaaggtgccccttcttgtgtttcaatgggatttttatttcgcgagtcttgtgggtttggttttgttttcagtttgcctaacaccgtgcttaggtttgaggcagattggagttcggtcgggggagtttgaatatccggaacagttagtggggaaagctgtggacgcttggtaagagagcgctctggattttccgctgttgacgttgaaaccttgaatgacgaatttcgtattaagtgacttagccttgtaaaattgaggggaggcttgcggaatattaacgtatttaaggcattttgaaggaatagttgctaattttgaagaatattaggtgtaaaagcaagaaatacaatgatcctgaggtgacacgcttatgttttacttttaaactaggtcaaaatgcagatcttcgtgaaaacccttaccggcaagaccatcacccttgaggtggagcccagtgacaccatcgaaaatgtgaaggccaagatccaggataaggaaggcattccccccgaccagcagaggctcatctttgcaggcaagcagctggaagatggccgtactctttctgactacaacatccagaaggagtcgaccctgcacctggtcctgcgtctgagaggtggtatgcagatcttcgtgaagaccctgaccggcaagaccatcaccctggaagtggagcccagtgacaccatcgaaaatgtgaaggccaagatccaggataaagaaggcatccctcccgaccagcagaggctcatctttgcaggcaagcagctggaagatggccgcactctttctgactacaacatccagaaggagtcgaccctgcacctggtcctgcgtctgagaggtggtatgcagatcttcgtgaagaccctgaccggcaagaccatcactctggaggtggagcccagtgacaccatcgaaaatgtgaaggccaagatccaagataaagaaggcatcccccccgaccagcagaggctcatctttgcaggcaagcagctggaagatggccgcactctttctgactacaacatccagaaagagtcgaccctgcacctggtcctgcgcctgaggggtggctgttaattcttcagtcatggcattcgcagtgcccagtgatggcattactctgcactatagccatttgccccaacttaagtttagaaattacaagtttcagtaatagctgaacctgttcaaaatgttaataaaggtttcgttgcatggtagcatacttggtgttttgtcatgaaattctctagtgatgtgtgggtacgcttaaaactggtgaaaatgtttagggatttaattttgagattggtaatgtgctcaaagttaagtcacttgactttggtatacacttgggtgggctgaggggcaagagccttctttgctgtttaagtcattacaagttaggatcctgggtaaatggcaaactttctgaagctcgaatttaaagtctgttgggaggccgaggcaggcggatcacgaggtcaagatatggagaccaccctggccaacatggtgaaaccttgtctctactaaaagaaaaaaattagctgggcgtcgtgtcgcctgcctgtagtcccagctattcgggaggctgaggcaggagaatcacttgaacctgggaggcagaggttgcagtgagccgagatcgtgccactgcaccccagcctggcgacagagcaagacaacatctcaaaaagttggatatgcaggctttttaaaagatggtcttgctctgtagtccagactggtatacagtggcacgatgacagctcactatcattcctgggctcaagtgattgcaggcattttctttacattgaaggaaagcaaatgtgcctgttgagacctaatcaaggattgctggagaaacaaagttttgattgaggctgcttgaatagtggtaacgtaactgctttcagttctgcaattaattgggtgactatgagctgtgtgtttattgctctgtagtgtattacaccaaagtgtttaacctgggtggtagtatgggaccataatcttgtctctttgctgtatatgctttaactgatgagccaagcagcagctaatcaccgagtatggaagacgactggctgaggagaaagatggcttgcaggtacttaatgttgaaaacggtattctgatctaagacaatcttcctgatcttgataagttaggtggcaagttaaagtggttcctcactttttttttggacagtctctcttgccccaggctggagtgcagtggtgcgatctcggctcactgcaacctccacctcccaggttcaagcagttctcctgcctcagtcccccacatagctgggactacaggggcacaccagctaatttttgtattttcagtagagttggggttttaccatgttgaccaagctggtctcaaactcctggcctcaagtgatccgcccaccttgacctctcaaagtgctgggattacaggcatgagccatcacgcccggccacgctgttggttcttaatgacacagcttaactttattgtgaaaagattgcagcaacaaatgagattttacctgtatttgttaaaaatgcttatccttgtctaagactggcaacataagcagttcttaggcttctatgccaatggacactaggcagtaatacatgtgcagtgctaatagaaaatattggagtaagggtgtactaaggaagttctcaatctttccccttcactatcttctgtaatgtaacttcaataaatgtgattctcatcttggcacaaaattgggaatggtgtggggagcgctgtttttcccaggtttatagtagagaaataatgttttctggtactaaaactggcatggtaagtgcatacttagagtaaggactttaaatcacgggccagttaatctctagttagtggtttggtacgcaagaagtacccatgggtgtattacacaaatgcaggaataccatatctagaaatacacctttgatattcatagtgtacctgagaatggtttcacgcataattttaggtaaactgccttagtcactctggttttacggatctttgcccacagttcctcgttcataacttctatagcccttgttatagtcatgttgtgtgtgttaggccacaggaaactcacttcacttctgcccttttaccttcactaagacgggactcttgatcttcccctacctttctgtgagtcctaagacccccatttcagagagggttctgtcctatactctgcggaaaggaatgctgtcatcttgaagcctccctacaaaaccaagaggactgagtttggatatgtgaacgtatggaggttcctggaggatggcacacccaggcaaggcattaaagctttgcaccctttcccccataccttgtcctatgcatctcttcaactgagtcctttgtaatatctttataataaagcaaatgtggccaggcgtggtggctgatacctataatcccagcactttgggaggtggaggtgggaggatcacttgaggctagagcttggggccagactgggcaatgggctcttgacaaaacaaaacaaaaaagtttaaatgggcttggtgacatatacctgtagtcctagctacttgggaagcttaggtggaagaattgcttttgagtccaggagttccaggccagcctaacacagcaagatcttgtcactaaaaatctagcttttcaaacctggaaaattactaaaaatacaaaaattagccaggcatggtggtgcacgtctgtaggcccagctactagggagactgaggtaggagaatcacttgaacctgggaagcggagcttgcagtgagccaagatctccccattgcattccagtctggccgtcgcaaaaaaaaaaaagtatccagtaaaaactcccctctcacctttccttgtatccccagaagaaaccgtttaatgagagtatatgttttcatttatttattcattcaacaaatattaggtgtttgccgttttttttaaaaaaaaatttaattttttagagacagggtctcactctgtggccctgcctggagtacagtgacacaatcatagcttactacagccttaaactcccgggctgaagcgatccacccgaggagctaggactacaggcacctgccactatgccaggctaattaaaaaacttttttcttcttcttctttttttttttttttttttttttttgagatggagtctcgctctgtcctacaggctggagtgcagtggcgcgatctcggctcactgcaactccgcctcccagtttcaagcaattccctggctcagccttcggagtagctgggactgcaggcgactgccatcacgcctgtctaattttttgtatttttagtagagacggggtgtcaccatgttggccaggctggtcttgaactcctgacctcaggtgatccacccgtctcggcctcccaaagtgctggggttacaggcgtgagccacggcgccaggcctttttttttttttttttagatggagtcttgatgtgttgcccaggctggagtgcagtggtgctgtctccgctcactgcaagctccgcctgccaggttcacgccattctcctgcctcagcctcccgagtagctgggactataggcacgtgcgaccacacccagctaatttttttgtatttttagtagagagggggtttcaccgtgttagccaggatggtctcgatttcctgacttcgtgatccgcctgcctcagcctttcaaagtactgggattacaggcgtgagccaccgcgcccggcggaggcattttttttttcttttaaagagatgggggtctcactgagcaccgtggctcacgtctgtaatccccaggactttgggaggccgaggcgaggggatagcttgagcccaggactcgagacgagcctggacgacatagcaagacttcgtttctgaaaaaaatacaagcattttgaacccaggaggcgaaggttgcagtgagccgagatcgcgtcactgcactccagcctgggcgacagagcgagacttcgtctcaaaaaaaaaaaaaaaaaaaacacaagcatttggcaggcaaagtggcgcacgcctgtggttccagccactctggaggctgaggtgggaggatcgcttgagccagggagtttgaggctgccgtgagcggtgatcgcgcaactgcactccagcctgggggacagagccagaacttgtctcaaaaaaacaaaaaacaaaaaactggccagtgtgtgaggggcgcgcgattttttgagatgtgagagggaattgtgcttcacggtcaccaccaggtgtcgcgacatcaggtgccgcgccgtcccgcttctgaggcgcggtggcctgagaaactggttgcagagcccgctcttcctagcctactgcccgaaaacgcagaatttggggaattggaactttggaggcgggagcgaaagacctctccttctcccgccggaaatacccctcttttgggaagcgcgcccctgccttccggaaaggaagaaacgtgatcacgccgctgcactcaagcctctgggtgatagagcgagaagaccctgtctccaaaacacaaacacacaaacaaacaaaaaggtaatgggggccgggcgcggtggctcacgcctgtaatcccagcactttgggaggccgaggcgggcggatcacgaggtcaggagatcgagaccatcctgcctaacacggtgaaaccctgtctctactaaaaatacaaaaaattagccgggcgaggtggcgggcgcctgtagtcccagctactcgggaggctgaggcaggagaatcgcgtgaaccccgggggcggagcctgcagtgagccgagatcgcgccactgcactccagcctgggtgaaagagcggagactccgtctgaaaacaaacaaacaaacaaacaaaaaaaaggtaatggggggccgggcgcggtagctcatgtctataatcccagcactttgggaggccgaggcgggtggatcacctgaggtcagcagttcgagaccagcctggccaacatggtgaaaccctgtctctgctaaaaacataaaaaaaatagctgggcgtggtggcaggcgcctgtaatcccagctactcaggagactgaggcaggagaatcgcttgaacccaggaagcggaggttgcagtgggctgagatcacaccattgcgctccagcctgggccacaagaatgaaactctgtctcaaaaaaaaaaaaaaaaaaaaaaaaaggtaataggaacattgctggtaattgctgtgtgaggacaccataatgcctgtctttctgaccttctttctgaccaccatttattacctgtctttctgaacttctatgccaatgtaaacatgcatatgtgtatagatatctccatatatagttactctcaccttgttcacagctgcattcacactagatataccattttctccttcaaataatgttattgctaactatgaatgtaatacatgctcagtgtaggaaatttgggaaatatagaaaaagaaagcactcattatccctgcgatccaagtatattcagtttggcatgtttcctcttttcccagttaattttttacttaaataacaatggatacaatacaagttgtaaggactcgaccagcagatacatagagagtgagtaaaaacactgaagtcctttttcagcgtcccttcccagctgtcctcttcccacgcatctttttctgtgccacttgctagaagtttggtgtatttaccaccagattgttttcagtgtgtcacatatgtttgtgttatataaaaacatactttaaaaattatatataaatggaattatacattatatacccatctttcttggagacatttccatgctagcacatatagatgtgccttattcttttcaaactgctgcaaaatatttcatggaatagatacaccgtattttacccttctccttactgatggtatttagattgtttctaattttttactattaaaacaatactgcaattaatatccttgtaaatgtctcttgtaacaaatgtgcaagtatttcttcaggatatactagaagtagaattgctgtatcaaagattatggcatttaataattggggattattacgaaattacccttcaaaagactgtacaacaatggaatattattcagccttaaaaggaagaaaattcatttagcagagcagaaactgaaaaatgaaaaaggaacttctgcctgggcgcggtggctcatgcctgtaattccagcactttgggaggccgaggcaggcggatcacgaggtcaacagatgcagaccatcctggccatcatggtgaaaccccgtctctactaaaaatacaaaaattagctgggcatggtggcgtgcacctggagttccacttagctacttgggaagctgaggcaggagaatcgcttgaacccgggaagcggaggttgcagtgagccgagatcagggcactgcactccagcctggagacagagtgagactctcaaaaaaaaaaaaaaaaaaactgctgggcgcagtggctcacgccagtaatcccaacactttgggaggccaaggcgggacgatcactcgaggtcttgagttccagaccagcctggccaatatggtgaaactctgtctctactaaaaatgcaaaaattagctgggtgtggtggcgcatgcctgtaatcccagttactcgggaggctgaggtaggagaatcgcttgaacctgagaggcagaagttgcagtgagccaagattgagccattgcactctagcctgggcaacagagtgagagactccatctcaaaaaaaaaaaaaaaaagaccagccttgccaacgtggtgaaacctgtctctactacaaatacaaaaattagctggtcgtcgtggcaggcgcctgtaatcccagctactctggaagctgaggcaggagaatctcttgaacctgggaggcgaggcagtggttgcagtgagccgagatcatgccattgcacttcagcctgagcaacaagatcaaacctctgtctcaaaaaaaaaacaaacaaaaaaaacttctgacacatattaccacatggatgaatcttaaagacattacactaaatgaaacaagacaggcacaaaaggaaaaatactgtgtgattccactatatgaggtagctagagtagtcagactcataaagacgtaaagtagaatggtggctgccaggagctgggaaaggagggaatggggagttagtgtttaatggggacacagtttcagttttgcaagatgaaaagagttctggagatggatggtggtgatggtcacacacaatgaatattaagtaatgctaccaaactgtacacttaaaaatggcttcaatggtacattttttgttatttatagttgatcacaatttttttttttttttgagacagagttttgctctagttgcccaggctggagtgcaatggcgcgatcttggctcactgcaacctccacctcccaggttcaagcgattctcctgtctcagccttcccaagtagctaggattataggcatgcgccaccaagcctggctaattttgtatttttagtagagatggggtttctccatgtgggccaggctggtcttgaactcctgacctcaggtgatccgcccacctcggcctcccaaagtgctgggattacaggcgtgagcccccgtgcccggcctgatcacaatttttaaaaagactgtaccaatatcaattcccaccaatactgcataagagagagtatctagtcctccaccacttcattaatattatacattatgaatcatttcaactttggacacgttgaggggcaaaaagaacactttattgttttaatttgcatgtgcccgattacttctgccattggataccttttgaatgtttatttaacattaatttgtcttgcgaattatctgttcatttcctttgcccaattttagtatgaatttgtatgacttctttatatgttctaacaactaataatttatctaattgtggtaaatattgtctttcagacttacttcacttttttttttttttttttttttgagacagtgtctcactctgttgtccaggctggagtgcagtggtgtgatctcagctcactgcagccttcacctcctgggttcaagactcccaagtagctgggcttacaggcacacgccaccacacccggctaatttttgtatttttagtagagatggggtttcaccatgttggccaggctggtctcaaactcctggcctcaagtgatctgcctgcctcagccttccaaagtgctgggattaccggcctgagccactgtgcctggccttacttcacttttcaattatggtgtcttttgtaaaaacagaagtttttaattaaaaaaaaatgctcccatctctccaaagataaaaaattagctgggcgtggtagcacacacctgtggtcccagctattcgggagactgaggtgggaggatcacttgagcccagggggccgaggctgcagtgagctgtgatctccccactgctctccagcctgggagacagagcaagaccctgtctcaatcatcatcatcatcatctgacaatctttttctttatggcttctgggccaaaggaataaatgaaggtataaggcttgttgataactattaataacacacattaaaaaaaaaactatgcataacacacattcgaaatctacagcgcgttgcctgaagttagcatgttgggttctggctctgtcttttgcttcaacagtgtttggaacgaacagaccagggggctccctcttccagcctctgatcgcctcccatctcctttccacttgagcctccaagaccatcttcttggcaacctcctgcttctgggcccagccaacaccgtttttgtggttatctgcttcttgtccccaagcatgagctcccagatgtgtcagaatcattccacccaggcggaggcaaccactaactgcctggtcaactggcatctctctgggcttctacttcagccgtgacgatgtggctctggaaggtgaactggccaagcgtctctggaagatgcaaagccagcatggcagcccgctcttctgcaggacctgcagatgagatgagtgggataaaaccctggatgccgcgggggcagccttggccctggagaggagcctgaaccagcctattctgggtcttcacgccctgggttctgctggcacagacctcatctctgggacttcctagagaggcctttcctagatgtgggagtgaaactcgtcaagagagtggatgatcgcctgacctctgcgggctggccgcccggagctgggtcaagcaactgtcttttccaaagtcttgccaccctcaagcacgactgggagcctagcgagcccagcgacctctgagaggctcctctcaaacgatcagggtttctgcctgcctgagcctccccctccagccactaggcagctttttaacaccctggagccctctcccaagcctggaccaaatttgcagggacaaaagcggggcaggggctggggtggggaaatcaaattaatgaccttcttagggtaaagatgtttcaggaagaggaaacctgccatcccacaacccctagaccataatagcatttattccttccagggatcaacaaaccagtgacagagagactctggagccattgaaatctactgattgaggccaggcacggtggctcacgcctgtaatcccagcactttgggaggccaaggcgggaggatcacaaggtcaggagttggagaccagactggccaacatagcaaaaccccatctctactaaaaatacaaaaaaaaaattagccagacgtggtggcaggtgcctgtaatcccagctattcaggaggctgaggcaggagaaccacttgaacctgggaggcagaggttgcagtgagccgagatcgtgccattgtacttcagcctaggcgataagagcaagactccatctcaaaaaaaaaaaaagaaaaatctactgattaatgcctatcttaactccagtgtcaatagtagctttgacaaacgccttttatatcatgtggctatactttgccaagcatactgagcactattataattgtttcctaataccccatgtgatacccccatgcttcatacgtttataacacatttaaaaatagcatgacgccaggggcggtggctcacgcctgtaatcccagccctttgggaggctgaggcgggcagatcgcctgaggtcaggaattcaagaccagcctggccaacatagtgaaaccctgtctctactaaaaatgcaaagaattagctgggcgtgggccgggcgcggtggctgacacctgtaattccagcactttgggaggcctaggcaggcggatcacctgaggttgggagttcgagaccagcctgaccaacatggagaaaccccgtctctactgaaaatacaaaatttgccaggcatggtggcccatgcctgtaatcccagctaattgggaggctgaggcaggagaatcgcttgaacccaggaggcagaggttgcggtgaaccgagatcgcatcaaggcactccagcctaggtgacaagagcaaaactctgtctcaaaaaaaaaaaaaaaaaaattagctgggcatggtgggcgggagcctgtaatcccagttactagggaggctgaggcaggagaattgcttgaacccaggaggcggaggttgtggtgagccgagatcacgccattgcactccagcctggacaacaagagcaaatctctgtctcaaaaaaaaaaaattttttttcagataatctggaacggtaaaaagaagagagtaaaattacctaaataaattaccaaattcccatcatctggaggtaactattgatagcacagatttttaaaaaatgggttatcatataatgctttctattttttatcctgcttttttaaacttaatttttctacttacattgttttatgctaataaatatatatcttcatttaaatagctgcatagctttctgttgtatatatcataatttatttaactcatactaatggggcatttgtaaacaactctatggtgtaaatgcatcccttcatatatatttatatgtgtatgtgtgtgtgtgtgtgtgtgtgtgtgtgtgtgtgtgtatttagagataggctcccactctgctgcccaggcttgtgtgcagtggtgcaatcatagctaactgtatcctcaaattccagtgtcaagtgatcttcccacctcagcctcctgagtagctgggaccacaggcacatgccaccttgcctggctaatttattttgatttttatttttttgtagaggtggggtcttaccatatgacccaggatggtctcaaactcgtggcctcaagtggtcctcctacctcagcctcctaaagcattgggatttagaggcataagccactgtgcccagtctcttgacatattttgtaaattaaaaacgaggaagaaatatttacaacacaggcgtgtgccaccatacccagctaattttttgtatttttagtagagacagggtttcaccatgttggccaggctggtctcaaactcctgacctcaagtgatccgcccacctcagcctcccaaagtgctgggattacaagcatgagacactgtgcctgacgttaaaggactaatttctttcttttttttcttttcttttgagacaggatcttactctgtcacccagactggagtgctgtgatacgatcacagctcattgcagtctccatgtcccaggcacaagtgatccacctcagcttcccaagtagctgggactacaggggcacatactacacctggctaatttaaaaaactctttgtagagacaggttcttgctatgtttctcagactggtcttgaactgctgacctcaaatgatccttctgcctcagcctctgaaagtgctgggattacaggcatgggccactgcacccaccgaaaggactaatttcttcaatatataagtggtttctataaatatatgagaaacagattaataacacaataggaaaatggacaaaggacaggagcagacaattcacagaaaagaaaattgttgttttttttttttgagacggagtctcactctgtcgcccaggctggagtgcagcggtggcactatctcggctcactgcaagctctgcctcctgggttcacgccactctcctgcctcagcctcccgagtagctgggactacaggcacccgccaccacgccaggctaattttgttttttgtatttttagtagagatggggtttcaccatgttagccaggatggtcgcgatcacctgacctcatgatccgccgacctcgtgatccgcccgcctcggcatcccaaagtgctgggattacaggtgtgagccaccgcgcctggccaaaaattgttcttaaacacatgacaagatgtgcagcttcacttagcataagaaaaatgaccattcaatgtatgaagtggcattttttaatatttcagattgacaaagataaaacaagactgttaatacttttgtttacaagagtgcagagaaatgcatcctcatgtattgttggtcggtgtaaactggtacaacctctttggaaggcagttgggtaagtagctatgaaaatctcaactgcagctgggcgaagtgcctgtcatcccagcactttgggagaccgaggcgggtggatcacctgaggtcaggagttcgagaccagcctgaccaacatgttgaaaccccgtctctactaaaaatactcacacacaaaaaattatccaggcgtggtggcgggcacctgtagtccaagctgcttgggaggctgaggcagggataattgcttaaacccaggaggcagaagtttcagtgagccgaggtggcaccactgcactccagtctgggcaacagagcgagactctgtctcaaaaaacaaacaaaagaaaatctcgagttcacataccctttgtgccagcaattccacatctgggaattttacagatactctcacagatgtgtaaaaagaagtatgagcacagatgttccctgcagtatcgttaataatagaaatacactcaaggccgggcgcggtggctcacgcctgtaattccagtactttgggaggccgagatgggtggatcacttgagggcaggagttggagagcagtctggctaacatggtgaagccccgtctctactaaggatacaaaaattacccaggcgtggtgtcgcacccctgtagtcccagctacttgggaggctgaggcagggagaattgcttaaacccaggaggcagaggtttcagtgagccgaggtggcaccactgcactccagcctgggcgacagagagagactccatctcaaaataaataaaataaaataaaataagaaaggtgaaccttagcagcagcaaggcagccatcacctttgctctctgaagcctgcggtagggatggatatgaattagctgtggcgggaggggctgagtaagctctgggaccacgtgactctgctggacacagcaggggaaggcagtggtccaggcttcccaaaaaccagccttgaggaataaagataacgctcccaattttcagaactgctctgctcactctgagtcagagtggaaaatactgactgctgcatctagcaaaggagatgtttcagcactgttttgggaagaagggcctgtagggcctatctgatgagggccttactgtcatctccccatcatgccaagcagcctttcctttgacccagggctcccacccccactttcagattagctgccagcctctaacactctgctgttttcccttcctgagaagcagccgctgtgaaagctgtttttctgagcatcaggcctgagcataatctgctttagcagctgaagtggtctgctcttcttttactgacaacactttaatacagaaattctgatggccttttagatttatatatgcttctccctcccctctgggcttttcctggaagtaggttggcaaggaacagtatggctcctacctccacaccagccaggaccttgagaagggagaaggtgctgagccactcaagcacatggccaggggagcttagaaaaacagggacttccaacctgcctgggcaatatagcgagaccccgttctccaaaaacaaggaaaaaagaaaaaagaaaaagagggaccctccaaacacaagcagggagaagctgaagaagtgggtgctagaagagcctggagatgtgtagatggcagcctgtctgctgctctgggccttggccattgcctgtgctgctgatgcttctgctgtctcttctcctttcacaaaactacaagagctcaggttggggctgctcaaaagcttcccgcaatgtgctgattcactctaagtgcctgctcctctgcagactgacttcatgcacttaaaataattcactcgtttcattgttagctctgtcctctccacttgcatttcaggccagagcactacagtgaggtcccaagctctgtcctgtaaaccacaggtaaaattctaaggcccctccacaaccatctgaatgggcccctcttcttggctaaggacattcccaagtaaatctgaaaatctagttcaggacatgacggaagagcaggtcacacaagcatcattataacttcctcccttttggaattcaggaaaagccaaccagcattaacatcaacacagatcttaagtctggtaagaaacatttacaatctattttctctgaagtttgctacctggaagcttcatctgcctgataaaaccttggtctctacaaccccttatcaaaacccaggcatttctttctactgataataagtctttcttcttttttttttttttcctagatagagtctcgctctgtcgcccagactggagtgcagcagcaccatcttggctcactgcaacctcttcctcccgggttcaagcgattctcccgcctcagcctcctgagtaactgggattacaggcatgtgccaccacacccggctaattttcttttttgtgagacagagtttcactcttgttgcccaggctggagtgcaatggtatgatctcggctcaccacaacctctgcctcccaggttcaagcgattctcctgcctcagcctcctgagtagctgggattacaggcatgcgccaccacacccggctgattttgtatttttagtagagacagggtttctccatgttggccaagctggcctcgaactcctgacctcaggtgatccacccgcctcggcctcccaaagtgctgggattataagcgtgagccatggcacctggccaactctttcaactaattgccaatcagaaaaactttaaaatctgcctgtgacctggatacactcctcacacgcacttcgagttgtcctgcccttccatatggaaccaacgtaagtcctatatgtatttgactgatgtctcatgtctccctaaaatgtataaaactaggctgtgtctgagcaccttgggcacatgttctcaggatctcctgagggctgtgtcacaggccattgatcactcatatttggctcagaataaatctcctcaaatacttttttgtcaacagtccactgggctcaggtgagcagggcctgaaacagatgacatggaaatttataataaaataaggggcccgtgccttaagacataccacaaagtaaatataacactgtacaggctctctcgggtgaccctggactacagaatgtgggttgtggggagggagagacgtggactttttcctgcaggtcatggcttgggtgcacctagaaacaggccaataccacctcttcttttctggaaaggtggggcctgacagctttgtgtggggaaccagtgtcctgttacagttcaggtctaaaatgcctgctgagtaaataaacatgttgttctcaacctaaaccgaaaagcctgatatttgtaggaataaaattgatctttcctaccctgagcaaagtgctccaaatatgctcagtcatggagtggagacagataagtaaacagacgctgggaatagagtggagacagataaataaacagatgctggggatatgtcgtgatacagagccaggccagagtcaagcaaggtgctgcattggcattctgccggcctttcctgcaggaaaaggtgtgaaaaagctcttggggtgatgggaaggggtgtgctgttttgaaatcggaagataaaaacagagccatggaggttctgcgccatcgccttggaacagatggtatctgcctccacatctgcaatgactcagatctctgctctgggcatacctgcagtcaaatcagggctgcccagacatcctgtgtttgtgaaatgctgagaaaaacagaaggggactaactggcttctagcagttgcctactcatccaccctcttccaaacacccaggctggggagtaacattttggggatgagtcctcgtaatgctgcttctctctagagagcaatgtgtgaaaattgacccaaggagttgtctcatggggtgaggcatgattggctgtcttttctcagagcctccctgaggctcatctacccccatgccctgagctcactggggcctgcctggccaaacagaatatacccattaagggaaataaatttccaggccacaataacaagcatcaccactttgaaaagaaagaaccataaactgaaattcttcagaataagaatttttaattagcctaataaacacattaaaagatataaaggaaaatactagaactatgaaacaaatgaatacaaaaacaccaaaaagaaccaacaagaaatactaagttgaaaatataaaagttgaggctgggcacagcggctcaagcctgtaatcccagcgctttgggatgccaaggcgggtggatcacctgaggtcgggagttcgagaccagcctgaccaacatggtgaaaccccatctctactaaaaatacaaaaattagccgggcgtggtggcacgtgcctgtaatcccagctactcaggaggctgaggcaggagaattgcttgagcccgggaggcggaggttgcagtgagctgagatcgcgccactgcactccaacctgggtaacagagcaagactctgtttcaaaaaaaaaaattagccaggggtagtggtgaacgcctgtagtcccagctactcaggaggcagaggcaggagaatcacttgaacccaggaggcggaggttgcggtgagctgagatcacaccattgcactccagcctgggcaacaagagcaaaactcccactcaaaaaaaaaagggccgagcacagtggctcacacctgtaatcccagcactttggtgtagggaaaagagagatcagactgttactgcgtctatgtagaaagggaagacataagaagttccattttgacctgtacattttttttttttgagacggagtcttgctctgtcgcccaggctggagtgcagaggcgcgatctcagctcactgcaagctctgcctcccgggttcacgccattctcctgcctcagcctccccagtagctgggactacaggcgcccaccaccacgcccacctaattttttgtatttttcgtagagaaggggtttcaccattttaaccaggatggtctcgatctcctgacctcgtgatccgcccacctcagcctcccaaagcgtaccttgaacaattgctttgctgaaatgttgttaatttgtaactttgccccagccactttgccccagccactttgccccaactttgagctcacaaaaacatgtgttgtatggaatgaaggtttaagggatctagggctgtgcaggaggtgccttgttaacaaaatatttacaagcagtatgcttggtaaaagtcatcaccattctctagtctcaataaaccaggggcactatgcactgcgaaaagccgcagggacctctgccctggaaagctgggtattgtccaagatttctccccatgtgatagtctgaaatatggcctcatgggatgagaaagacctgactgtcccccagcccgacacccataaagggtctgtgctgaggtggatcagtaaaagaggaaagcctcttgcagttgagatagaggaaggccactgtctcctgcctgcccctgggaactgaatgtctcggtataaaaccccgattgtacatttgttcaattctgagataggagaaaaactgccttatggcaggaggcgagacatgttggcagcaatgctgccttgttattctttactccactgagatgtttgggcggagagaaacataaatctggcttacgtgcacatccaggcatagtacctccctctgaacttaattatgacatagattcttttgctcacatgtttttttgctgaccttctccttatcaccctgctctcctaccgcattcctcttgctgagataatgaaaataataatcaataaaaactgagggaactcagagaccggtaccgatgcaggtccttggtatgctgagcgccggtctcctgggcccactgttgtttctctatactttgtctctgtgtcttatttcttttctcagtctctcgtcccacctgacgcgatatcccacaggtgtggaggggcaggccaccccttcactttgggaggccgaggcaggtggatcagtaggtcaggagaccgagaccatcctggctaacatggtgaaaccccgtctctactaaaaatacaaaaaaaaaaaaaaattagccaggcgtggtggcgggcgcctgtagtcccagctactcgagaggctgaggcaggagaatggcatgaacccaggaggcagagcttgcagtgagccaagattgtgccactgcactccagcctgggcgacagagcgagactccgtctcaaaaaaaaaaaaaagaaaaaagaaaatataacagttgtactaaagaacacaaatgattgaataaacagcagaatggacagagctgaggaataaattagtggactggaataacagaaattccccaaaaggaagaagaaaaaataaaagaacaggaaatataaaagaatagctaagggatatggagaataaaagtgaaatggtaacattcagaagataggattcctggaaagagaaagagaaaaatggaaaggaggaaatatttgaaaaaataatgaagaaaaaattctcagaattaggaaaaaagatgaagtgtgaacacaagatctgtatacggattattccttattaaaaataattttggccaagcgtggccgggcgtggtggctcacgcctgtaatcccagcactttgggaggccgaggcaggtggatcacgcggtcaggagatcgagaccatcctggctaacacggtgaaaccctgtctctactaaaaatacaaaaaattagctgggcgtggtggctggcacctgtagtcccagctactcaggaggctaaggcaggagaatggcatgaacccgggaggcgaagcttgcagtgagctgaaatcatgccactgcactctagcctgggcaacagagcgagactctgtttcaaaaaaaaaaaatttttttggccaagcgtggtagctcacgcctgtaatcccagcactttgggaggaccaaggccagaggatctcttgagcctaggagttagacatcagtctgggtgggcaaaaacctgtctctacaaaaaaaaaaaaaagtaaaaaaaattagcccagtgtggtggcgcaaacctataggtaggagggtcgcttgagcctgggagatggaggctgcagtgagccgtgatcactccactgcacttcagcctgggcaacagagcaagaccctgtctaaaaaaaaaaaattgagagttggaatatgtcaatgaggagagagaaggaaaaatttacagcgagaaacattttggggaaatttaagaatatcagagacaaaaagaacattctaaaaatttccagagagtcagagatcacagataaaggaacaagaggcctatttatttatttatatctttttgagacagagtctcactctgttgcccaggctggagtgccgtggtgccatctgggttcactgcaacctctgcctcctgagctcaagtgattctcctgcctcagccttctgagtagctgggattacaggcgaccaccaccaggctcagctaatttttgtatttttagtagagatggggtttcactatgttggccaggctagtctcaaactcctgacctcaggtgatctgcccgccttggccccgcaaagtgctgggattacaggcgtgagccactgtgcaggccgaagaggcctatttattaacattagatttttcaacaccaataccaggtgcaagaagataatggagtagaattttcaaagtaatgaagggaaagatcttagaacctagaatctctttttgagacagggtcttgctttgttgcccaggctggagtacagtggtgtgattatagcttactgcagcggcaatgtcccacactcaggtgatcctcccatctcagtctcctgagtagctgggactatgggcacacaccaccatgcccagctaagttttttgatttttagtagagaccaggtctcgctatattgcccaggcaggtcttgaagtcctgagctcaagcagtcatcctgccatgacctcccaatgtgctgggattatgagcgtaagccaatgcacctggctttgacctttaaaacaagaaacctccccactgcccgtggaccccatatctccttccagttagttgccacctctctgcttccctctataatgaagcatctccaaagggtggtctgcagacattgtctccaccccctccccctttttttgttttagattgccttttttttttttttctgcagtcctgaaaatcatcacgtacagattgtcttttaaaaagaaataaaataggctgggcgtggggactcacgcctgtaatcccagcactttgggaggccaaggcaggtggatcacctgaggtcaggagttcaagtccaggctggctaacatggtgaaaccccgtctctactaaaaacacaaaaattagccgggcgtggtggcgggcgcctgtaatcccagctactcaggaggctgaggcaggagaattacttgaacctgagaggcagaggttgcagtgagccaagattgcaccactgcactccagcctcggtgacagagtgagactccgtctcaaaaaaaaaaaaaagaaaagaaatgaaatgaaatatgacagttatgtttggcttccagtttaaaaatggcttcctgcccaaatccctctagaatgatcattaaaaaatttaaaagtggccaggcgcagtggctcatgcctgtaatcccagcactttgggaggccaaggcgggtggatcacctgaggtcaggagttcaagaccaacctgaccaaaaatggtgaaaccccatctctactaaaaatacaaaaaattagcggggcgtggttggggcgggcgcctgtcattctagctactcgggaggctgaggcaggagaatagcttgaacccaggaggcggaggttgcagtgagcccagatggcgccactgcactccagcctgggcaacagagcaagaccccgtctcaaaaagatcctattttctttgtgtgttttgttgttgttgttgttttgtttgcttgtttgtttttttcagagactgtctcaccttgttacccaggctggagtgcagtggaacaatcatagtttactacagcctcaactcccaaactcaagtgattctcctgcctcagcctcctgagtagctgagattacaggcatgcactcccatgcctagctaacaaggagttctagcttataggaactggtttaacattgtttaatgcagtgttttccaattttcaatttcagtttttatttcagtttttgtgtgtgtgtttgcagtggtgggtggtggggggtgggggacagagtctcgctgtgttgcccaggctggagtatagtggtgcaatcttggctaattgcagccttcggctccctggttcaagcgattctcagcctcagccagtagctgggaccaaaggcccactccaggatgcccggctaatttttgtatttttagtagagacagggtttcactatgttggccaggcttgttttgaattcctgacctcaactgatccaccggcctcggcctcctaaagcgctgggattacaggcgtgaaccactgcgcctggctttgtccctggttctttagccaatgtgtcatctccgcaaaacattcttgcccactctccttttcccccaagcagcagcaataaactttccttaaagtctgtgagtctggcagaaggcggaggctgcagtgagaggtgattgcgccactgcactacagcctggatgacagagagagactccgtctaaaattttgaagtgtagcaggacgagccacagacaaaactcctcagacgccagattaaagaaggaagaggtttttattcggccaggagcgtcagcagactcgcgtcttaagagccaagctccccaaaaaagaaattctagcccttttaagggcttacaactctagggggtccacatgaaagggtcatgatagatcaagtaagcgtgaggaacgtaactgggggctacatacatcagctaacagaacaaaaagttttacagtgctttctcatataatgtctggaatttacagataacaccagtagttttggtcagggtttaatattattattattattttaaccaccagggccaggtggtggcgccaaggtcgtctagctatttatcttacttctgtttctttccaactttttgctttctcccttttctcctgtcttataaactagggaaaaggggaggtgggggagaagctgggaaggacaacaggagaagtggtggtctcattccataaaagaaaaggctacaggtctgggaggcaggtcagacactgccaacggcaactgcagcaagaataagaaacagtcccttcaaaggagccaggggtacaggtgcgcatcacggaactccactcccgtggagacacagccaggggtgcaaggatcgaaatcagattagtgattatcagagactggcggcaggtgaggagggtgcaaaggggcaccagggcacttttttatttttttgagacgttgtctcactcttgtcaccgagactggagtgcagtggcctgatctcggctcactgtaacctccgcctcacgggttctagcgattctcctgcctcagccttccaagtagctgggattacaggtgtgtgccaccactcccggctaattttttctatttagtggagatggggtttcaccatgtaggtcaggctggtttcgaactcctgaccttagatgatccaccggcctcggcctcccaaagtactgggattacaggtgtgagccaccgcgcaccagaacacattttggggtgatggaaattcactatatgttaattatggtgctgccgggcgcggtggctcacgcctgtaatcccagcactttgagaggccgaggtgggcggatcacgaggtcagaagagcgagaccatcctggctaacacggtgaaaccccgtctctactaaaaatacgaaaaattagccaggcgtggtggcgggcacctatagtcccagctactcgggaggccgaggcaggagaatggcgcgaaccccggaggcggagcttgcagtgagccgagattgcaccactgcactccagcctgggcaacagagcaagactccgtctccaaaaaaattaataaaaagaaagaaagagagagagaaagaaagaaagaaaagaagggaaggaaggaagggagggagggagggagggaagggaaggaaggaaggaagaaagaagaaagaaagaaagaaaaagaaagaaagaaaggaaagagaaaggaaggaagaaagaaaggaaggaaggaaagagttggccgccatggctcacgaaaaaaagaaagaaggaaagaaagaaagaaagaaagaaagaaagaaagaaagaaagaaagaaagagtgttggcctgcagaggtggctcacgcctgtaatctcaacattttgagaggccaaggccggcagatcactgaggtcaggagttcgagattagcctggccaacatggtggaatctggtctctactaaaaattcaaaaactagccaggtgtggtggtgggcacctgtaatcccagctactcgggaggctgaggcaggagaatttcttgaacccgggaggtggaggctgcagtgagccgagatcatgccactgcactccagcctgggcagagcgagactccgtctcaaaataaataaataaataaataaataaataaataaataaataaataagccagacatagtggcgcgcgcctgttgtcccagctaactggaggctgaggcaggaggatcgcttgagcccgggagatggaggctgcagtgagccgtgatggggccgctgcactccagcctgggcaacggagcaagaccctgcctcgaaagaaagcgtcccaaggcgcctggctcaccgctccagagcgcgctcccgggtcggcctccgccctccaagccggagggaaatgctgtggtcccgccgtccgcctgcatcctccagttcctttggagggcaggggagtggagcccacaggctctgacacccttacagtccagctctgtgacttggggaagggagtggcgcatgaggagggcgaagctggagtccaaaggaaggtccttccgttcccgcccccgacccgggatccgccgaagcgactgcggaggcgggtcccaggcctgtcccaggagggggtgtccgggagggggaccgatgcctacgtcagacaggagggcaggggactcgcgggattcgtggggaagcgagaggggaaagagcagggaacgtgcgctggggacgcggccgaggcgcagtgggagggggcccaggattctgggtagttagttgggcggggggcggggatgcgcctgaagctcggtagcgagaggtactggggtcgcggtgggagtcttagcagaaccgcggtggagcctactacccgagggacggggtagggggcgcggctgaggcaggtcggggtgtgaggggtgggaggcgcggctgaagtgggatggaagggcgtggagaggcgagggtgggaggcgtggctgaggtgggatgagaagaaagtagcgaagtgaggggtaggggaggcagaggcaagggtgggagggagatgggggtgaggggtgggggggtgaggggtggaggagccggaggaggggtgaggcagatgagggtgaggggtcgggggatgaggggtggaggaggcagaggtgagggtgggagggaggtgggggtgaggggtagtggggtgaggggtggaggaggcagaggtggggtgggaggcaggtgggggtgaggggtaggggaggcggatatggggtgggaggcaggttggggggtaaggggtggaggagttgaaggctggaggggtcagtggtgggggaggaggaggtgcggtgggaggcaggtggaagcgtgaggggtggggaggcagaggcggttgggaatgcatcctgtgcctgcggaaattggggaaattccccagaggggtaggggcttggggctgggctcccagatttggccaagacctggctgtagctattctgggtcctgggagagacggaacgtccgggcctggctgagctgtggcctctggggctccctggggcggtatgggaaggggccatgctttgcgtgagaaattatctcaggctgggcaggctgtgcccagccagctggtccccttgccctccaggaggtgtctggtcccctttggtcctctctggccctgtttgaggaccagctagcatttttttttttctccgctgcctcagtcttccttgctccaggaagcctgtgctgcctgctaaactgccttattcgtatttcttttctgtgagattcagacacaatcttctcagggaagcttcatctggccagttagacatagccccagccctggcttggggccaagtttcggaattagtacaaagagaagcaaaggctgcaggtccaggccctggcttgtctacaccgctccagcccctacccccagcaccctcaagtgtcccatctttttttacttttaaggccagggcagtttccaccttccagaccctgaaatgctctctcccaactctttttttaatttatattatgcacaggctttagacatgtcttgcacatgtgagttggatatttttctacatctaaaagagatgccaattttattttttaaagccagtggcaaaaatttcaaacaggcagggcgcggtggctcatgccagtaatcccagcactttgggaggcccaggcgggcggatcacctgaggtcgggaggtcgagaccagcctgaccaatatggggaaaccccatctctactaaaaatacaaaattagccgggcatggtggcacatgcttgtaatctcagctactcgggaggctgaggcaggagaatcacttgaacccaggaggcggagattgcggtgaactgagatcctgctattgcactccagcctgagcaacaagagtgaaactccgtctcaaaaaaaaaaaaaaagaccgggcgcgatggctcacacctgtaatctcagcactttgggaggtcgaggtgggtggatcacctgagctcaggagttcgagaccagcctgcccaacatggcgaaacgctgtctctactaaaaatacaaaaaatcagccaagcgtggtggcgggcgcctgtaatcccagctactcgggaggctgaggcaggagaatcgcttgaacctgggaggcagaggttgcagtgagccgagatcgcaccactgcactccagctgggcgatgagcaaaaactccgtctcaaaaaataataataaaaataaaaaataaaaaaataaaaaaatttcaaatagtacaaaggatgcaccttatgtgccttcccatccctgacctctagttccctgctccggaggacacatctgctacatattttggtgacctctctttgctcttattaaaaatctatctgaaaataaattcaaataaaagaaacatttataaaaagttacaaagtgaaatgaagcacaataggaaagatagggtataaagcctgcttggggtagattttcgttaggcggacactggactgagtgaggcttctttttttttttggtttctttttttttttgagacggagtctggccctgttgcccaggccggagtgcagtggcatgatctcggctcactgcaagctccgcctcctgggttcacgccattctcctgcctcagcctccccagtagctgggactacaggcgcccgctgattttttgtatttttagtagagacggtgtttcaccgtgttagccaggatggtctcgatctcctgacctcgtgatccgcccacctcggcctcccaaagtttttttcgtttcttttaatggagtcggagtctggcactatctcccaggctggactgcagtggcgcaatctcggctcactgcaacctctgcctcccaggttcaagcaattctcttacctcagcctccagagtagctgggactacaggtgcacgccgccatgcctggctaatttgtgaagcttcttgaaatatgaatccagtggtattcagattgaggaagtcttgcttccctgcttgattcacttcccactaaaaacacaggcattcttccctacacaggggactttttaaaacaaagatataattcacatacaattcacaaatataaagtgtacatttcattggtcttttagtgtaattcacagagttgcacagctgtcatcacaatcaactttagaacattttatctcccgcaaaagaagcatcatacctgagctgggtgcattggctcacgcctgtaatcccagcactttgggaggctaaggtagatggcttgagtctagaagtctgagaccagcctaggcaatatagtgaaaacctgcctttagaaaaaatacaaaaaaaaaaaaaagaaaaaaaaaaagacccaggtgtagtggcatgtgcctgtagctacttgggaggtcaaggcaggaggattccccgagcctggggaagtcgaggctgcagtgagccgcagtcacgtgccacggcactccagcctgggcgatggaatgagacactgtctcaaaaaaataaaaaaagaagtctcataccttttagcagtcagtcctcctttctacactcgcccccaacatccccttgccctagacaaccactttacagttccctgttttggatatttcatataaatggaatcacgcagattacttcttgacctttcagctaaaatcaagtgtagtatctgttcttatcagtttgacgtgtcccttatctgaggatgtaataaaaataaaaataaataaatggaatcatgcagtgtgtgatttttgtgactgacttctttcatttaacctaatttttcaagtttcttccatgctatagtgtacatcagtacttaatttctctttttgtggccaaataatattccattaaatggatatgccacattttatgtatccattcgtcatcagttaatcatcatttggggtgtttctatttggttattatgaataatgctgctgtaaacattcatgtacaagtgtgtatggacatatgtttccatttctttgagtacatacctaggagtggaattgctgggtcgtatggtaactatgtttattttatttttttttttttgagacagagtctcactctgttgcccaggctggagtgcagcggtggcactatctcggctcactgcaagctccgcctcccaggtttatgctattctcccgcctcagcctcccaagtagctgggactacaggcgcccgccaccacgcccggctaatttttttttgtatttttagtagaaacagggtttcaccatgttagccaggatggtctcgatctcctgacctcgtgatccacccgccttggcctcccaaaatgttgggattacaggtgtgagccaccgcgcctggcccttttttttttttttttttttgagacagccttgctctgttgtccaggctgcagtgcaatggcaggatctcagctcactgcaacctccaccatccaggttcaagcaattctcctgcctcagcctccccagtagctgggattataggcatgtgccaccatgccctgctaatttttttttttttttttttttttgagacagactcttgctctgtcgcccaggctggagtgcaatggggcgatctcagctcactgcaacctctgcctcccgggttcaagtgattctccttcctcagcctctggagtaactgggattacaggcgtccaccaccatgcctggctaatttttgcatttttagtagaaacaaggttttgccatgttggccaggctgctctcgaactcctgacctcaggtgatgcgcctgcctcggctgcccaaagtgctgggattacaggcctgagccaccgcacccggcctaattttttcatttttgatagaggagggttttcgccatgttggccaggctggtctcaaatgcctgacctcagatgatccactcacctcggcctcccaacatgctgggattacaggagtgaaccaccgcgcccagctctctatgtttaatcttttgaggagcagccggactgttttccaaagtagttgcaccattttacaatctcccaggagtgtaggacaggtccaatttctccacacccttgccaacactttgttgttacatgtctttttataatagctatgttagtagtgtgaagtgggaccacattgtgcttttgatttgcctttccctgatggctacaatccaaggcctttttgtaaccagaatttgcaattaaggttatctgtctacccaattgtcattttcaccggatgtggtgatggctctggaggacttcaggttgtccacttttcacttttttctcaacagcacagcagtgccctctgcactatgattataagccatcctgtcattcaaagccttcttgagcaccacttggatgccaggcactgtgctggttgctggggatacagcaacaaagcaagatctcaccccttggaaagtatggtggtaagcctgtggccctggacttgaatccttgctttctcacctcccagccttgtggccttggccttacccatgctcagttttcttgtctgtgaaataaggttgctctgggagttacatgttgagcgcttagcacagtgtctggtgcatagtgagtgctccgtaagtattttttattgttaaaggtgaaggcggggacagtggctcatgcctgtaatctcagcactttgggaggcggaggtggccggatcacttgaggtcaggagttcgagaccagcctggccaacatggtgaaaccctgtctctactaaaaatacaaaagttagccgggtgtcgtggcgcgtgcctgtaatcctagctactggggaggctgaggcaggagaatcacttgaatctgggaggtggaggttgcagtgagccaagatcatgccactgcgctccagcctgggcaacagaatgagactccgtctcaaaaaaaaaaaaaaagtgaagccagacaatataataaatattacagtaacggataatgagatgtgggggaagtacagagtgtcatgggagcacatagtggcgatccccagcccagtccagggtctaggaaaggctatctaaaggaagtgatgcttaaattgagagatgatggatgagcaggagttggctagatcagatcaagagcagtgtgtgtgtgtgtgtgtgtgtgtgtgtgtgttcctggcaggtggaacagaagaggcatggcatactggggagactgaaatgtgttcagaatgtctagagcagtgctgtctaatagaactctatgtttatgaaaaatgtctcaggctggcacggtggctcacgcctgtaatcccagcactttgggaggctgaggtgggcggagctcctgaggtcgggagtttgagaccagcctgaccaacatagagaaaccccgtctctactaaaaatacaaaattagccagacatggtggtgcatgcctgtaatcacagctactcaggaggctgaggcaggagaatcacttgaacctaggaggcggaggttgcggcgagctgagatcgtgccattacactccagcctgggcaacaagaatgaaactccgtctcagaaaaaaaaaaaaaaaagaaagaaaaaaagaaaaatttgtcatctgtgtgctatccgatatggtagccactagccacatgtgccaactgagcatttaaaatgtggctaatgggacagcagaactgaatgtttactgttattttattatgtatttatttttgagacagagtttccctcttgttgtccaggctggagtgcaatggcacaatcttggctcactgcaagctctgcctcccaggtttaagcgattctcctgcctcagcctcccaagtagctgggattacaggcacgtgccactacgcctggctatttttttttatttttaggagaaatggggttttgccatattggccaggctggtctcgaattcctcacctcaagtgatccacctaccttggcttcccaaagtgctgggattacaggtatgagccaccgcgcctggactaattttgtatttttagtagagatggggtttcactatgttggtcaggcaggtctggaactcctgacctcaggtgatccacccacctcagcttcccaaagtgctgggattacaagcgtgaggcctattataattgatttaaatctaaacagtcattgtggctagtgactatcttattggatggcgcaggcctagagtgtaatgtgcatgacagggttgccatgagtgacggatagcgatggagaagggcatctggactttgagggctcatggtatggagtttgcattttattccaagcaccatgggtgaggttttgtgattaagtcaaggcgttaggtgacctggttttctttttttttcttttttgacacagagtctcgctctgttgtccaggctggtgtgcagtggcacaatctcagctcactgcaacttccgcctcccaggttcaagcgattctcctgcgtcagcctcccaagtagctgagattacaggtgcccaccaccatatccagctaatatttgtatttttagtagagatggggttttgccatgttagccaggctggtcttgaactcctgacctcaagtgatccatgcacctcggcctcccaaagtgctgggattacaggtgtgagccactgcgcccggccctggttcccatttttaaaaggtcacttcagttgctataaggagaaatggattatgagtgtggggcaagaatgaagcagggagaccagtttggaggtggctgcagttgcccaggggagcagtgatagtggcttggaccactcagaaagacaaattttggaggaagagctgatgccaggttttgggagtgagggagagagattcctagggctacttcggtggtggttgggtccccaagctccaagactgagtccagaccagggccccgttggtggtgaggtctgattttagcagtgcgtgcccacctccttgtctccacctgctggctggtgcttggagcacctttaggggaactttagccatcagagtcctggggtcaggaggctgggagaaggtcctgggaggtgggaaagtcccccaactgctgggtggatgggtgggtgggactgtgttcccaggggcatctgctgggctgagcctctccctgggggctgtccacatcagctttctcccctgccatgggtcaactcaggcccatttatgggccacacggctgcttggaaggcatgtggtggagaaggggaggagatagctgtcagtggacttggggaagaatcccccatccatggcagcttccatgggtggcaagtccccagcatccaagggctgcctctgagtgtcacccacccccacctgagaccttagtggctagaagggggaggggtgggggtggagcctgattcgcagcagggtgtgtccagatggtcagtctctggtggctagcctgtcctgacaggggagagttaagctcccgttctccaccgtgccggctggccaggtgggctgagggtgaccgagagaccagaacctgcttgctggagcttagtgctcagagctggggagggaggttccgccgctcctctgctgtcagcgccggcagcccctcccggcttcacttcctcccgcagcccctgctactgagaagctccgggatcccagcagccgccacgccctggcctcagcctgcggggtaagtcggtgggcaatgctggggacgttggagggggccgggtctccaagcctgacagtgaatgatggggtggggaaggcctagtgggctcctggcttctacagcctggagccagggtctgtgtggggctccagcaccctctccctggacctccacaccccttcctctgctgccagggtgggtgagggtcccaggaggtggggtgggggctggacagacaactgttgctgctggggcttgggagtctagggctggaggaatgggccagggtttggttggggacacagatgggctaaacggtatgaaacggaaagagcacccttctgccccagtgtgtgtagaaagggtggtgggtcacatctgcaaactgaggcagccaggcagctccccacctcccatgtttccatgggaaaataccccacccgggtccccagggcctggtcccagcctaccctctccacttccctctgctggtgccgctcctctctgctctctgccccctgccccctgcccccttctccacccttctgtctccttaccactctttgactccttcttctttctgatcctgctcactgggcccatgagggttccccaaccctgaccgaggccccacccttgccaagtgatggaggctgtggtttcagttttcctgtgagggtgagattgtgctgtttgctgagcttcctaggccagcctagggcctgaggcagcgtggtggagagagcctgggccacaggctaggggcctccctcccttcgtgaagcccccagaggccctgaggcacacaaaggtagtattcgatgccttcagagctgaatcagactgaaaatatagacagaccctgaaaggctttgaaaacggaagaggaacgtcatggtagacgcatggtgtcagatccggctctgccaacaactggcgaccttgggaaagccactccccctttctaagccttagtagtcttggcagcaaaatgaagggtttgatagtctagtggttttcccagttatttcttcttagagctccccttctttggcgaggggttgagtgactggccccatcccagtcatcgcacttttatctgttggaatattggctgccaggcaagacgttgtgtaaagaaagggttgtgctgttaatgtaaatggtaacaggggttgtgacccctcagattccaggaagtcccagaggaaaagtcggggacagtcatggctcttcctgggggacaacatcaaaagggtggccctattggttccctgttcctcaccccacaggcctccctccctctcctcacccctgctgctcatccctcctggcccacttcccctgcattggggctgggctcccacacagtgggtggacctacttgcacttggcatttttgccattagaagtaatgagaagtaatggcaaaaaccgcaattttttttttttttttttttgagacagagtcttgctctgttgcccaggctggagtgcagtggtgccatcttagcttccgggtttaagcaattctcctgcctcaccctccctagtagctgggattacaggcacaagccaccatgcccagctaatttttgtattttttttagtggagatggggtttcaccatgttggtcaggctggtctctaacagctgaccagccagcctcagcctcccaaagtgctgggattacacccagccaccacgcccagccttttgcactaacctaatacctccttttgcaggctccagtcaggccaacaccgacgcgcagctgggaggaagacaggacccttgacatctccatctgcacagaggtcctggctggaccgagcagcctcctcctcctaggatgacctcaccctccagctctccagttttcaggttggagacattagatggaggccaagaagatggctctgaggcggacagaggaaagctggattttgggagcgggctgcctcccatggagtcacagttccagggcgaggaccggaaattcgcccctcagataagagtcaacctcaactaccgaaagggaacaggtgccaggtgagacagcaagtgggggcagggcaaagggggccccctgcccagctccagcagagcacccggagtgagactcattgactagtccagcaccagtgccccttcccacagcctgtggagtcctcagtctggccctggtggctcctgggcccgacaggctgcctctgctctgccatctggcattgctctttccagaggcttccccattcttggccttctgccttctgaggtcatgttcttcatgagatacattcttgagctctaagtcctcaactgaccctcaaatccccctgttcatgccaactcccacccctgtcatggtccctgttggggaaggcagcaggatccacactccatccagtgagaatcaaggacatctggaaatgtcccaggctctcctcagttctgcaagactgagcctgtcactcaggggacgtgaactgtgggattggggatgacaggcttctgcttggagtcatctgcactttgattttcctgtggtctttccaccaattcagactgtgtgagcaccacattcctgagagtcccacttccagtcctgctgcatttggcaccccctacttccctgcccgggggcggggcctgcccagtgaggctggagaatcctcatgggccaggctagactctgccacagaagccccttcttcccttctcatgcttgaggtacagccaccagctttggcctcgcaggctagagctgcttcctgtttgtgctggaggacagtggtcagattcagcaccagggtaggggaggatgcatgaggagattctgggagctgtggagcctgcccgacacaggcaggacgggcccttgatgctttcagtacctcaatctgtgccctcaatgggcttccctaccccaggaccatgatgccaccctggtgacagaaagttctttgtccaaatggccacttctgccagccagactgtccacagggctcctgtcagcagcagatagagccctcatggtcatgtgtggcttcctggtgctgacaaaggagggctggctgtaattacagtcatagctgttggcttaaaaagtctacccttgaaatccccacctgattcaaggaggcagaggttgcagtgagcagagattatgccaccatactccagcctgggtgtcagtgtgactctgtctccaaaaaaaaaaaaaaagtgacggatcccaacaatcaccttgtcaccaacctttacttggttgacccattccacaagagacattaagctgggacctgagggtctacaaatcatcaaatagcaccccctgttctttgtcttcgcatatctgctggtggtggtaccagaagccccagaggcaagttggcccctgtgattagtaacacagcccaggagggaatgactcatgcccttcccacttccagtcaccagacgctgctagattctagattctgacaagctaccagatcccttccggggtctgtgggagagatttctcattaggtgtgccttcttggtggtgtctgatatgtttcaacattgggcccagcgttgggcccaggtaatgctctgtttctgggaaatttcttgctgccaagcctagaatctctctggggattcagagtcagggtctaaagttaaacagccctgctgagattcccagtttggcgctgtgtgactttggcaagttacatgacctccttgtttatctaatggagaaatgagtagtttctgaccagcagggctgaagtgaagatgaaaggcacagaatattctgtagttaatagatggtttctaagaggagaagggagattttctgcatactttctttgaaggcagtgatgcatgcagccactgtgagtctgcggggacctcccacagccctatccagatccagccccaagctcaagagccaccacaagtggtgtgtgctgaaggggacccagtgggatatcgaggctgttgagagatggtacatcaaggcacctggcacatgacaagcacctgatgctgaaaagtgtctgtgatgactggcgtcatggggatgaagcagcttagtgcctggacaggccccttttcctcctcccggggtcccctaggatggctctaggaggatagaggccctcagaagggctctcactgggctcctgggcctgaggggtgtgcagtgtgtacaggactccctgaaagggctccctgggatggagggcttttgggggggcctgtggttcttctccagcatgagtcacaaaccacatcctccacagtcagccggatccaaaccgatttgaccgagatcggctcttcaatgcggtctcccggggtgtccccgaggatctggctggacttccagagtacctgagcaagaccagcaagtacctcaccgactcggaatacacaggtagaccctgccctgtggatccaaggctaggcatcctgtgagctgatagttaggtgggctgtgtgggcttgatccctggtcaggagctgaggagtgagtgttctcagcagccctcccactggaaggatggctggggggccctgtggacagagttaatcaaggatggcctcctgtcagtcttggctgtgcctcccacttccacccacccctcaggcctcctggctacctctgtcacccctagcccattgcagtggctgaatggaaacccaaagcaatctttttttatcttttttaataacagtgttgttgagatataatatataatgcacataccatatacttaacccatctcaaagcactctttgcccaaaatctaaatatctgtattgtttgggctgatcagaaaaataacatgagtactctagaagattcaaacagtaaggaaacatatagagccaagggtaaacacagtctctcatcctgggctccaattaattgtttgagaatgcatctgttcagactttctttctttcttcttttttatttttggagagatggggttttgccatgttgcccaggctggcctcaaactcctgggctccagtgatccttccaccttggccccccagagtgctgggattacaggtgtgagccaccgcgcagggcctatccagactttcttaatacatcagtatatatttacataaatggggtcttgacacatatactaatttgtaacgtgcttttcctccacttaatacatcttgtagcactttccatttcagtacatgtctaacttagtcactttgacaactgcagagtgagttttcccttgtgtccttatcatcatttagttaaccaattccttacttatcgatggccattttaggttgttcgtagtttttggcttcaactagctgtgtgccaggccctctgtgtgctatccactttgtttatattattcccctttttttttttggagacggagtcttgctctgttgcccagcctggagtacagtggtgcgatctcagttcactgcaaaactccacctcccgggctcatgccattctcctgcctcagcctcagcctcccgagcagctgggattacaggcaccagccaccacacctggctaattttttgtatttttttagtagagacagggtttcaccgttttagccaggatggtctcaatctcctgacttcgtgatccgcccgccttggcctaccaaaaatgctgggattacaggcgtgagccaccgcgcctggccattttttttttttttttttccgagacggagtcttgctctgtcacccaggctggagtgcagtggcgtgatctcagctcactgcaacctctgcctcccgggtccaagcaattctcctgcctcagcctcccgagtagctgggattacaggcgcccagcactgcgcctggctaatttttgtatttttagtaaagatgggatttcaccatgttggtcaggctggtctggaactcgacctcgtgatctgcccaccttggcctcccaaagtgttgggattacaggcgtgagccactgcgcctggccttatattattccctttgaaccttacaataatcctggaacattcccattttacagtaacgaaaactgagattaagagaggccacgtgacttgccagaggagatagagacattaagtggtggagtcatgtacaaatactgctctgaatgttctgctgtagacagcatttcacgaatgatgacttatgtcttagaaatttagtttctaagccgggcgcagtggctcacgcctgtaatcccagcactttgggaggccgaggtgggcagatcatgagatcaggagatcgagaccatcctggctaacacggtaaaacccgtctctgctgaaaacaaaaaacaaaacaaaacaacaaaaaaaattagccgggtgtggcggtgtgcgcctgtggtcccagctgctggggaggctgaggcaggaaaacggcgtgaacctgggaggcagagcttgcagtgagccaagattgcgccactgcactccagcctgggtgacagagcaagactctgtctcaaaaaaaaaaaaaaaagaaaagaaaagaaaagaaaaagaaaaaaaaagaaatttcgtttctagggcagaaattgtagtcatgtctgttggtatttcttatctgttacttggagccttaatagcctataacatggttgtgctcccaccagttatgtgtagcatctcttttaatcctcccaaggggtactttgagctgggcttataagagctatcgggcagcccagccactccaggtctcagcaccactgtgccccttcccctcccttcttcccacagagggctccacaggtaagacgtgcctgatgaaggctgtgctgaaccttaaggacggagtcaatgcctgcattctgccactgctgcagatcgacagggactctggcaatcctcagcccctggtaaatgcccagtgcacagatgactattaccgaggccacagcgctctgcacatcgccattgagaagaggagtctgcagtgtgtgaagctcctggtggagaatggggccaatgtgcatgcccgggcctgcggccgcttcttccagaagggccaagggacttgcttttatttcggtgagtgagcctttcttggataaatcgaggcaaagagagagtaaggcctggttcaaggtcacatggttagtgtatgacagagctggcagttaaacctaggtttttctgaccccgatgccctgcttctaaccactaggctgcctgcaaaagcagtttgtcttttgtccaggccagcctcaaactcctgggttctaacaatcctcctgccttagcttctcgagctggggctacaagtgtgtgccaccacatccagcattaatttgtcataagagatgtttcatcctcgtctggccagaagacgggcatgcacccagacccagacccagggaaagaaataggggctgctagcactggcatgtgacttggccaggcagagcctgaataaagaggcagcatgcctgggctctggcaaagaagacagcaaaaggcagcaggttggctggcccctgttctgctcccttcagtggtaaagaagcctgacctgtttcaaggagggctggccttttgtccaaggagcatgaggagtaggcagatggaaagcaggaggcctggggcccaagctgctctcttggcctgcaggtgagctacccctctctttggccgcttgcaccaagcagtgggatgtggtaagctacctcctggagaacccacaccagcccgccagcctgcaggccactgactcccagggcaacacagtcctgcatgccctagtgatgatctcggacaactcagctgagaacattgcactggtgaccagcatgtatgatgggctcctccaagctggggcccgcctctgccctaccgtgcagcttgaggacatccgcaacctgcaggatctcacgcctctgaagctggccgccaaggagggcaagatcgaggtgagcggctgtccccttcccacttcccctctccaggaagcagtaggtctcatcccaaaatttctgcagaaagaacccagggggtggtgaagagcagtggcttctctgcttttcaatggaacactcctgttagtaagaaaattttcagtatgtacctctgatatatttctgtttatttataaattgcatatgaactactgaatatattacattataaaacattgagattttttttttttgagacggtgtttcgctcttgttgcccaggctggagtgcaatggtgcgacctcggctcaccgcaacctctgcttcccaggttcaagcgattctcctgcctcagcctcccaagtagctgggattacaggcatgtgccaccacacccagctaattttgttttttttttttttgagacggaccctcgctctgtcacccaggctggagtgcagtgacatgatctcggctcactgcaacctctgcctcccaggttcaagcaattctcctgcctcagccccctgagtagctgggattacaggcacccaccaccatgcctggctaattttttttttgtattttcagtaaagaggggtttcaccatgttggtcaggctggtcttgaactcctgacctcgtgatccacccgcttcggcctcccaaagtgctgggattacaggcacgcgccactgcacccagctaattttttgtatttttagtagagatggggtttcaccatgttggccaggctggtcttgaactcctgacctcaggtgatctgcccacctcggcctcccaaagtgctgggattacaggtgtgagccatggcacccggccaaacattgggaatttttaaaagtcgtttgtgtttctttattaagagatagcctttttatatcttttgcctattttgctattctgtttctgcatatttattgataactttataatgaatttagtattttgtctaccatagcacttgtaaaatttctcctagttcatcatttgtcttttgaattttatgttttttttgctatacaggatttaaaaatttttataatctgcaagtgtgactatcttttcctttaaggttccatggttttgctattgtctaattcctgctacaagattttatatatataatacatattatatgtacataatatatgttataactattatacattatattatacattataattatatatagtatatatataatcttcatacccatattttcttccaaacttttgcagctgcatttttttttttttttttttgagatggagtttcgctcttgttgcccaggctggagtacaatggcgcgatctcggctaactgcaacctccgcctccggagttcaagcgattctcttgcctcagcctcccgagtagctgggattacaggcatgtgccaccacgcccggctaattttgtatttttagtagagacggggtttctccatgttggtcaggctggtctcaaactcccgacctctggtgatccacctgcctcagcctcccaaagtgctgagattacaggcatgagccgaaacgcccagcctgcagctgcatttttaatgcctagagctttgactagctggaagttattctggtaggaagagtaaacatgaggcagcccccactttgttccagatagcttaccaatggcctgttccaaatagcttttgccaatagctcaccagggctggcctcatgggcttacagtggagatttttgaaagattaaggaaacgataaacataaatagaagttttaaccctttttcgctgccctcccaagttttttggagtgctccctggggtgtgtgaacctcactttcttgtctagaggcactgctgtgtggcctatgaaagcagtgtcctgatctgttcctcctttcccattcctcacgcgtgaaaccagactgcttcctaacctgtttggattagggaccactttctagtctgttgaaaattctagattctgaccgcgaaagtgcacacacagatacagctagtagactctgatctcaggggcctcaaggaccccagggctagggatcaatctgccatttgaggagttcaaggaaggccacagggcaggggaggggaaggaagagccaggctggctggcaggctggggcagatgtggctgggtgcgtgtgtgtgtttaagagtttagacaaacaaggacctgcgtgtatgggggtacgtgcacgtgtcagctgcagctctgcagaccgtgggcagctgctgagtcctgggtgtttcccagccttggcccaggatcagtgccaggaagggaccatgaatgcaagctcatatggccaccctgcagattttcaggcacatcctgcagcgggagttttcaggactgagccacctttcccgaaagttcaccgagtggtgctatgggcctgtccgggtgtcgctgtatgacctggcttctgtggacagctgtgaggagaactcagtgctggagatcattgcctttcattgcaagagcccggtgagcccacaggagcatgggtgcacgcagaggacccagcagagtttccagcaaggtccacaaattggggctgcctgctggaccatatctgccccattcctgtgccagtgggggtgtggctgcatgtcccagcaggcacgaccctgaccatggccaccgggcccatactcaatccatactctagtcccatccaagacggggatcatgccaagggcctcgtggcaaccatccgggtcctctctgttaaccagcatctcatttggagggcaagccccttagtcacactgtagctgggagggttggcgtgaggtcctttggggctcctggggtgtggaagcctgctccctgtcctctctcctcatttcctgggcccttgctttgatcttgacatggagtgggcagcctatttgcacttgttgagtgtacccatggctctcccctccccaccccagcaccgacaccgaatggtcgttttggagcccctgaacaaactgctgcaggcgaaatgggatctgctcatccccaagttcttcttaaacttcctgtgtaatctgatctacatgttcatcttcaccgctgttgcctaccatcagcctaccctgaagaaggcaagggcgtgaggtttgggggggcacatcttgggggaggcctgcttgaaacaaccctgggggaagatggggcagtaatagtgctgaggcatgggctgctggagtgacattcccaagcttatgggagccagcactgcagtactaacggtgatacagtgaagatttgctgagtgctcactgtatgtgaaaaaggattctaggtgatggacatgtgttgactaattaatgtgccccaaaacccttgagatggtgaattataatcacccccagtttatagtagagggaagggaggcacagagaggttaagtaacttgcccagggtcacacagaatggaagtggtgtggagagggaatctgaatccagggagtctggcttcagaccctacactgaaatgctacacaatgtgcctctcaggatccaggggtccttccctggagcccatgttcccatgccgttctgaggagcctctccacagctcaggctcagagtaggccctcagcttcagctctgaagggtgagctgttcgagagaggacccaaggccctaggtctcatctgagtgtgtcttcagcaggccgcccctcacctgaaagcggaggttggaaactccatgctgctgacgggccacatccttatcctgctaggggggatctacctcctcgtgggccaggtgagtgcccctccccttctcctaccaagaagcaaacctagaattctgcttcagggggcttagagaaagttagctgcatcccctcactgacaatacccagtcccacccagagcaaccagcctcactgaagctgagggccagaggttctggccttgccttctgagtccccaggaacccctctgctgtgcttttggggttccttggggtagcagatagcttctctgattccttggcagtacagactctgctcccccaggaatggagctggaagcgcctgcccctagccaggcccctcggctgggaagctcccctcttggggagcacagagaccagaggtaggtggggttcaggctatttcccccagtagggcctcttcagtgggaaatgctgtaagcctgcaggacacaggctggacaccaagacattgggacctccgcagagtgggcagaacttgggcaccaaacgcaggttggctggggtatgggtgctccctgtgaggccagggagaagggaagggaaaggtgctcttccccttcctgcatgcagtgcacaggctcttcacctgcaccccccggccttgcctaggtggctgctctttctggaaagaaagtcccaagctatctcagctatcagaagtattcatgagtcccccaaaaccaaagctgctgacttagctctagcctgggtggcaggctcccactcagccaggccagcagggggcatgcgggagagcaggtttcacagccctctgtcctcccttcctccgcagctgtggtacttctggcggcgccacgtgttcatctggatctcgttcatagacagctactttgaaatcctcttgtacgtgggttctcactcctccttctctcaactgtctctgaggtctggaaggggcagttgtggcagaaggcaccaggttggctttagaggcgaggacacggggcccaggaagtcgggatctgtgtacaggccagtcccaggagtctgggctgccgtccagcctggggccccttgtgctcccatcactgtagatggtgatagtgacatttactaggcctcggcacatacctgtttcacttagtccttgaaaacactctatgagtcaggcatcattattattatgcccattttacagtgggagggaactgaggcccacagaggttaaatgtcttgcctaagatggaggtcaggaccttggtcagcataggccagtgggggctcagggagccaagtggcccgcaagcccacctggattctgctcccacacagcctgttccaggccctgctcacagtggtgtcccaggtgctgtgtttcctggccatcgagtggtacctgcccctgcttgtgtctgcgctggtgctgggctggctgaacctgctttactatacacgtggcttccagcacacaggcatctacagtgtcatgatccagaaggtgagagaagggggtggcccaccgggactcttttggcctcatcaggcaagaagagccttcctccacagctatcctaggcagaggagggcatgtgtacatctgcctgtgcgccagcactcagatgcttgctggatggaagcttaagtacaggcctgcacatacctctctcagggctctgcatgcacacgcaaacaaacgtacatatgtgtgtttgcaggtgtccacacgggagcatgtgcatccttccacaagcaaggagcaaagaatatgtgcataagctcatctgcatgtctgtgtcctgcgatgtgtgggcgcgggcatgtaactgcattcatttatgtattcagcgcatgtttagggagtgcctactgtgggccgggccctgttctaggtgttgggaatatagcagagaacagaacaagtccttgctcccctgaagctgatgttctggtgggaggaaatgaaaaccttaagaaaacaactgagaacattccacactgctaaattctatgaaggaaaaaaaagcacaggacaatgtgatgcagaatggctgggaccaagtaccctttagatgggatggtctgggaagcctctctaaagaggggatgtttaagttgagacctgaaagaatgattcagccacagcagggtgaagaggagatattctcagcagagggcacagcagtggctgccacgagccagaaggagcttggggtgcttgggacagggtgaggaggctaggtggctggggagatggcaggagggtggaggtgaggaggttgggaggaagggaagggccaggggccccttccacggggagggatttggaggtccccagaggcttttttttttttaattgtagtaaaatacacctaacatggaacttttttttttttctttgagatggagtctcactcttgttacctaggctagagtgcaatggcaccatctcagctcactgcaaacccctactcctgggttcaagcgattctcctgcctcagcctcccgtatggctggggttgcaggcacccaccaccatgcccggctaatttttgtatttttagtagagacaggttttcaccacgttggccaggctggtctcaaactcctgacctcaggtgatccgcctgccttggcctcccaaagtgctgggattacaggcatgagctactgcgcctggcccattttaaccttttttttttaaagtatacagctaagtgtcattaagtacattcacactgttgtataaccatcaccaccatccaactccagaactttcttgtcatcccaaactgaaactcaacacccattaaacaactccccattcccttcccccagtccctggaagccaccattctaatttctgtttctacgaatttgatgaccatagctacatcgtagaagtggaatcatacagtatttgtcctttaatgtctggcttattttactcagtataatgtcctcaaggatcagccatgttgtagcatgtgtcagaaatgccttccttttttttttttttttgagatggagtcttgctctgttgcccaggctggagtgcagtgatgcaatcttggctcactgcaacctccgccacccaggttcaagcgattctcctgcctcagcctcccgagtagctgggactacaggcatgtgtcaccacatccggcaaattttttttatttttagtagagacggagttttgccacgttggccaggatggtcttgaactcctgacctcaggtgatccacccaccttggcttcccaaagtgctgggattgcaggctgagccatcacgcccagccaattccttcctttgtaaggctgaataatatcccattgtgtagatacaccacattttgtgcgtccattcatctgtcgatccagtcacctgttgcttccaccttttgaccattgtgaataatgctgctacgaacaagggtgtaaaagtatctgttagagtccctgctttcaattcttttgggcatatacatacccagaagtggaattgctgggtcatacagtagttctatattttattttgtgaccctggaaggttttttttttttgttttttgttttttgttttttgagatgggactcattcagtcacccaggctggagtgcggtgacacgatcatagctcattgccgccttgacattctgggctcaagcaatcctcctgtctcagcctcctgagtagctggcactgtaggcttgtgccaccatgcccagctactggaaagttttaagcaggaaaacaatgtgatctgagacatatatatatatatatatatatatatatatacatattttttttttttttttttttgagacgaagtctcactctgtagcccaggctggagtgcagtggtgtgatctcggctcaccacaacctctgcctcctgggttcaagtgattctcctgcctcagcctcctgagtagctgggattacaagcacaggcacaccactgcacctggctaattttttgtatttttagtagaaacgcggtttcaccatgttggccaggctggtcttgaactcccaacctcaggtaatctgcccgcctcagcctcccaaagtgctaggattataggcatgagccaccgcacccagccagatctgagatatatttttaaaagactcctctgctcggtgtggctccacaggcccacatatgcatatgtatgtgtgcgtatgtgcagtgtacacgggaaccatgctgctgtgggtgaggcagggttctggggtcgtgactggtggcccagctacccaccctggcccctgggcacatgtgttccaggtcatcctgcgggacctgctgcgcttccttctgatctacttagtcttccttttcggcttcgctgtaggtaaaggctccctccggccccctcccccttccccacgttccttgtccaccctgtacactcccaaggctgcccaccggtctcctgggctaaggacccctctcccttcatcccatagccctggtgagcctgagccaggaggcttggcgccccgaagctcctacaggccccaatgccacagagtcagtgcagcccatggagggacaggaggacgagggcaacggggcccagtacaggggtatcctggaagcctccttggagctcttcaaattcaccatcggcatgggcgagctggccttccaggagcagctgcacttccgcggcatggtgctgctgctgctgctggcctacgtgctgctcacctacatcctgctgctcaacatgctcatcgccctcatgagcgagaccgtcaacagtgtcgccactgacagctggagcatctggaagctgcaggtgccaccagagaggctccctgcccccaccccaccccacactcaggcggtggggagtgctccggaccctgcggagctgggccttccctagccaggagatgccgggttgggcagctctaccttgtcagtcttcctcttccttttttttttttttttctggagacaaggtcttgctctgtcacccaggctggagtgcagtggcacgatcacagctcaatgcagcctcggcctcctgagctcaagtgatcctccttcctcagcctcctgagtagctggggttacaggcacctgccaccacacttggctaatatttttattttttgtagagaagaaggtctcactatgttgccccggcctcaggtgatcctcccacctttgcctcccaaagtgctgagattactcccacctcctttaagctcatagatgtacttaggacagtgcccagcaccaagcaggtgctcaatgtgctaccagctactcttatcatcattgctgtccagtgtttcttttttttttttttttgagtcaagagttttgctcttgttgcccgggctggagtgcaatggtgcaatcttggctcactgccacctttgtctcctgggttcaagcgattctcctgcctcagcctcccaagtacctaggattacaggcatgtgccaccacaccccactaattttttgtatttagtagagataaggtttcaccatgttggtcaagctggtcttgaactcctgacctcaggtgatacacctgcctcggcctcccaaagtgctggcattacaggcatgagccaccatgccccaccctgctgccaattcattgttgatcttggggaagccccttatctcctctgagccttggtgccctcctctgcaaggttctgtgccccacctgactcactggtgtgcctctgggcaggcacatgtgtggggtgagcaaatgaagttctgttcctggtggtgtggcaatctggagcctggaacgatgtaagagcaagtagctgtccagtactcataaggtacagacttcccatcagctgtctgaggcactttgtcctcagtctacaaatggggaaactgagatgcagagaggctgagggcccaaccccacacaggtaaccggatgttggagccagattcgaatccgcgtgtttagttgacttcgcgttatactgtgaagtgctgcgcggcacttccctgctccgcttgccttgtgtgcctttgcccccaggcagggtcccaggacgttctgtctgatgcatcctttgtccccagaaagccatctctgtcctggagatggagaatggctattggtggtgcaggaagaagcagcgggcaggtgtgatgctgaccgttggcactaagccagatggcagccccgatgagcgctggtgcttcaggtgagtgagtggtgggagggtctcctgggggccttgctgtccagcaatccctggggcccccctgcagtgcagggcacagctgccaggagccaggtctggtgggaagggcaggcccaaagagcaccagggactgagcctgagcaggtgaggtcaggggtctggatctcacaagccatggctgccacatgactggccatctgcctgtcccagtggcttaaactgaaggtcccctcctggtgatctcagactcctccttgtagcctgaaatgtgttacggtaaggaggccaagaagtcagagggacccttgggttgctagcactctagcattgccctggctgctctgtgtccccccacccccaattctgccagcctgatctctgagctacaaccccttccatggagaacatgcccttctgtgtccaggaaaggctgggacactgggagagggaacctagtgacaaacacacagctaaaaacagacactgtcggccgggtgcagtggctcatgcctgtaatcccagcactttgggaggccgaggcgggcaaatcacgaggtcaggagatcgagaccatcctggctaacacagtgaaaccccatctctactaaaaatacaaaaaagtagccgggcgtggtggcgggcgcctgtagtcccagctactcaggaggccgacgcaggagaatggcatgaacctgggaggcggagcttgcagtgagctgagatcgcaccactgcactccagcctgggcgacagagcgagactccatctcaaaaaaaaaaaaaaaaagaaaacaacagcaacaaaaaaaacagacactgtcgtgaggcagcagatgagcagagagacggagtcttgggcatgaggagcagccatgataggccccagaacccggaagcacagatacacctgatctgaattcctcttctctggttgttctgggcaacccaggctgctgtgaacagccagaagcgatggatgctgattcctgcaagtgagcacctgcctcacaggacagggctccaagtgggtggcccagaaccctgcagagaaaaagcctgtcctcctcagggcctctgtgtccaccagagcatctctgcatagtctcccaatttggggggccacgcccctctccggggtgggaggggaggcggtcaaagcaggcaaacctcagagctgctctgttgccctcagggtggaggaggtgaactgggcttcatgggagcagacgctgcctacgctgtgtgaggacccgtcaggggcaggtgtccctcgtgagtagcctggtgactagagcctctgccctggggtgtgtgtctctgctgcttggccacaaagccttggagagtctggggcaggacccagagacctcctcatagtccctttgcagatccccacatgccagctcctcttagagggattgcctccttaaaacagtggttccctcctttcctttccacccacaccttgctttcaggcaggaaccaggggaaacctctgaggctgttagcgcttccaccagcccagcctctggctgccctctctctgatgccagtcagtcacaccctttgcccattcaattggttatcgagggtctgtccccagccaggcctgggctgagcctggggactcagcaggggaataagttaggaagggctgtgtcacagcgcagcctacaacagaggcagcatctccctggaccctcagaggaactgccctgcataggcccttagtcccttcacaccccaagtcccccacctctgagaaaccacttcccatgcttcctccatgtccgtggcctgtgtcctctccgttccagtgtagtgatggcccctcctgtccccaccctgctgcctccaccaagactggttccttcctcccaccctcagaggcctgttctgaggattagctgtccccactgcataccctttctttctagaaccttcaatagctcccaccttccactggttcacctcctctcctttctccatctctttcctgacaaatttcacttgcttgtgcctgttgccccccacaatagcctcctgagtctcccatggcccctgttgtagggaggctcctctggcctcttctgccccacagcctgctggtttcccaggctcctgggccgtgaccactgcctcacatacagataggtttcccttcaccttctctttgcatctccctctcttcactacaatgccaggaaagtcacctctgaaagtcaccttgtccctccctcatcttgccccaagcactccacaccccactgcctgctggggcctccaatgtgacattcccaacaggaacagcctcggggctgccccagcaggtcacatgtatgtcaccccaccccctcctcacccaggtggaaggccttgagagtctcagcctattccccccgctataccagctctcccacctggagctgagtgtccttgacccctcaggcggccactcatccctctgccctgccctgcctcttacttctgcaccactgcaggggggcccagcctgcactcttacccattgcagtcctgctaatgtggacaaaaaccacatgcagcccacgctacacaatgcctcccactacctggaaggccgcactgctcagaatggaggtcagggcccaaagctgtctaactcactccccacacctccatccacatgtctgcagtactccttgttctttgctttccttggttcatctctggattcgtctctgtcggaagtgctcttcctcccctctggatgtccaaatctgccaccgcccctgcaggacaggtcccctctctcctctgagctcccccagcatgtctcaggtgttctgatctctgacacacaagtctgtcacctccaggcactttaagctcctgggggtggcaggggcagggggaagcccctgatatggcaggggattgggaaatgcttgtggagtgagggaagcagggagaaggattgctggcctccaggatcgctgaggctgtccccacggcatgacgtgttttcatgactgtggccccgtttccctggtgcctgcttcctggggacacactcaagggttaagctacagtgcttgccatctgtttacaggaactctcgagaaccctgtcctggcttcccctcccaaggaggatgaggatggtgcctctgaggaaaactatgtgcccgtccagctcctccagtccaactgatggcccagatgcagcaggaggccagaggacagagcagaggatctttccaaccacatctgctggctctggggtcccagtgaattctggtggcaaatatatattttcactaactaactcttctggaaacattatttgggcagagttgctgggacccttagagctggcaatgtctgcatgtctctgtgtgcacaggtctgtgtatgggactaggttgctcctgcccttgcctgggcacagagaccctcagttgctgtgtccccaccctcacccccacatccccaagtctggggactgtcctcttcctgggtacaggcagctggctgaggtgctgtgcccattgttgtggcagatatatggtgatggacatgggcaaacagccacctctcctctctctccaccacgacaccctttgctttccacacccaccctgcttttgggcaggtacctgggaaaacccattaaagccacctctcttgctttctcttcctaccgagcttcttgctcaattcccacccctcccaagccattctctgcagggcagccagagggccttcctaagacataagacaaacatgtcctctttgtgctctgaaggcctgagaggctccccagtacccacagaatgccctagctgacatcccgagacccccacggttttgcccaagcagttccagacacctcctcccctccacctctgttgcccctccctccttagcactctccccaaattcatgcaggccgagagacctcgtgcttgatcccttgacctggctcttgctggaagcccccctcctccattaaaaccctacacttgggggtggggggagggatagcattaggagatatacctaatgtaaatgatgagttaatgggtgcagcataccaacatggcacatgtatacatatgtaacaaacctgcacgttgtgcacatgtaccctagaacttaaagtataataataaaataaaaccctacacttgccgggcgcctgtaatcccagcactctgggaggcccaggcgggcggatcacctgagttcaggagttcgaaaccagcctgaccaacatggagaaaccccgtctctactaaaaatacaaaattagccgggcgtggtggcgcatgcctgtaatcccagctactcgggaggctgaggcagaagaatcgcttgaacccgggaggcagaggttgcggtgagcggagatcgcgccattgcagtccagcctgggcaacaggagcgaaattccgtctcaaaaaaacacaaaaacgagcaacaacaacaacaacaacaaaaaccctacacttatttctgaggccagctcaaaaggtcttatgattgtcttcccagttttttgcagtcaaaatgaatttctttcccttggtataacgtgtgtgtgcaaaacgtggttgcatggattctttttcaaggagagagctgagcatgttcataggctgaaaggaaagccacagtagagagagttttccatggaaggtgaggcaggggcataggtggaggaggccccaaggaatgaggagaggaaaggaggtgggcagagctttaccccagaggcgagcagaggatggacgtggatctagataagacgtcagctcgttccctaaaggtcgtgctaaaggagtaatgagggtgaccagtgcgcaggggtttgagaagccccgtggatgtggtgaaatagctgtggggagagtatttggcaacgctcaatagattcaggaggagctactaggatgaatggctgccttgtgccacagctctacaggctttcacgtgtgtcatctcacgtgatcttctggggcgctggtgtctccgtttactagaggaccaatcggaagcttaaagagaatgagtaattggcccaagaccacccagctaaggagtggcggaggtggggcccaaacgcgcgatccagccctcgcgcaggcgccctggaactccccgcgcgtgttgtgacccagaattcccggggctgtggaagagaccatagactcaacaggagggggagtcctgggtagcgcgccggtctaaatcgttacttggcggaaagttcccatgagtctttgccagcgtccccctccttttgtgaggattgggatattccgactccttaagggcctggcgcacataaggtgtgaccttttcattcccgttgttatggaggtaggctctctaggaatctgggagtagtagctggggggcaagagcaaataaagagctcgagcttctgtggtctctggggagatgttcccgggaagcctgtctagagggcggagggcagctgttgagatggcgtggctccccggctcctgcgcccgcgtggctttcgcggcgggcgctgcggcccggtattggacagcctggcagggcagcgcggggccgaatccggctgccgtggctgaggctcatggatcactcttttgtggtagggccacatctgccagagcctggagtctgcgaaggccgggacccggttccccggcccacagtgggggtgtgcaaacccgagagaactgggtaagttggggtcggcttgcagtttggggtaccccgagggcggtgtacgtcggtaagattgtaacagtattactggaagacttattcgactgtcctgatgatacttgtaataggaagtgccgtcagaagcgataactgacgacgtctaatgtctatctgaccgcagtcgctgaaacctctacaacttagttgaccgtaactgccagagccctgccctgaattcctgtccttactccctctttaagattgcgtacccactgcagagtgctgaagacggggtagccacgaggtgagaggctctctggtgtagggtttaacatggaacgtagttttgtcacttgaatgcacggaaattggcgttttgacagttttctacgtttaggtgttttatacactttagggtaacgttatcatgtcattgcatagggtggaacttaaatagaaactggagatggctgcttcagccacagtcctaacctagaactgcatttaaagcaaactgataatgcagaaacaaactccttcgttaagaaatgtctccagtagcagggttagcttaagtttcaggtagggtctagatctgcggttggaacagtactggagggttgtgaggtgcttgactgctctgatgaaatcactaataggaagtgccgtcagaagcgataactgacgaagactactcctgtctgattgcagtcaagtcttcaccacttgctggttcccaggagtaaacttgtttgaacggtgacctaattgctatattcacctaggttgcaaattcgtgaagaatcagcatcatgtttggcagctgagtattggagccaggagcctgccatgaggtaagccttgctctatggggaggctagtggctgaccacgcctagctgtcaggtcgaatattggcaattggatttggttaacctaataccttgtaacagtgtagcctatcccagagatactgattttagtttccggtggcagtggagccagggtggattacctagaaagaggggctactctatttacctcttggctgtttagtctcgggcaaattacctgtctgctgagatgtagttttcctcagatgtgaaaaggaaaagtaatcttagctttgtgaagtttaaattgatatgactgaaatggagattacaactcccctgaggctgggcacagtggcctgtaatcccagcactttgggaggctaaggtgggtggatcacctgaggtcaggagttcaagaccagcctggctggccgacatggtgaaaccccatctctaccaaaaatacaaaaattagccgggtgtggtggcgtgtacttgtaatcccagctactttgggggctgagccaggagaatcgcttgaacccgggaggcggaggttgtagtgagtcgaaatcgtgccactgcactccagcctgggcaacagcgagactccatctcaaaaaaaaaaaaaaaattacaacctactgagaagctaattaagatttgtagtcctcaataatttacaaaaacttagaaaaattacctctaattaggtcttaaggggcttttgttaggatggacttaaatttgtaaagtcattaattgactgtcatcagaaatgcctgtcctgctctgcatctgcagtctctaaggtgtatgcgccttctccattcccccaggttttgagaacagagtgctgttttagagctggcagcagcatctcagcccaagagaaggtaagccttgagctggccaatgatcccttcaaccccatagtggaatgaataaacagctgatcttgttaaaactcgcttcaaaaaaaaaagatatcaaatgatgaaatcacccaaaatagctggaattaccggcagattgtgtagtggtgaacctatggttttctgaagatatctcttaccctgtgattgactgtcagttggtgcagaaagtgagattgaaatgtagtttctttgcaggttatattcccagaggatgtcagtcccaaggaccagtagctgccatcagtttggattctgaaaactaactggcatcaacactgggtgtagaaacatgcttgccttatgtatcagaggacatgctcagcagatccaagagatatatttggcaactttttctagaaaaggcacattgggtatcattcattacattcttgagtttttttgggtttttttttttttttttgagacagtcttgctgtattgcccaggctggagtgtggtggcacaatcacagctcattgcatcctcaatcacccaggcctaagcaatcctcccaccttgtagctgggactacagctcacagcacacctggctaaaattttttttttgttgagacggattctctatgttgcccaggctggtctcaggctcctgggctcagatggtcctcctgcctcagcttccaaaggcacaggccaagttgtagctttgtcccttgccatcatgcccaacaagaggttctataccttttaatgaattgactttcataaattggttatgttggtgggcaaagttctttaagctggaaattgtaaattcctcctgaaatgttttttcatgcagttaccatgaactaatactacaataaaggatggtcttgggtgtcaattcttgaaaatgtgtatttgaagaaaaagtaaatttcgcctactgttgtcagatattagcagtccagatattcgctctagcttgtaaacttccctgtggtcagcctaagctcttaaccccctattctacagctttagactgaaggcaaaagctcaaagcatttaaggcctcctcaatttcggcccctgctgctctgtgctctgttccttggtgtagctttgttccagctcctgcagcattgcaccattcctaaccacaaccttaacagcatgtagggccccatactctaggccccatcttgctgtcttcctgtgttggaatcttgcctaccaaggcctgtcaagagggtcctcccccatactgtttgcccacaaggttcaagagtgattggctcccagtcttcctggactgaactacttggatctaggggttgcctgttatttagaagagatcccttaactggtagggccctttcagtaggacagtatttgggtaaggggagggtataagatgagaacctttgctaagttaggttcctttgggagcctccagtttgtttctccctctccccagccatcttgttggatctgccaagggattggactccttcattgtcctaggtttttaaggttttaaagcccaccttctgcagtcggttttctggaatgtgttggtggattacttaagagttatggggaaagagttcttacggcctgtctaggtcagtgaagtcatactggcaagtgacaagaaggaagccaggtttgtcacttaccctgcatgctaaggacatcagagcccacatagaagtctggtagtttttcagccagcagtgggtagggaaggtggataggggatttctgaacaggactttatgcctgtatgcatgggcaccatgtctgtcctgagcactaccacatggcatcgtaggctgctctgtcaaaggatatagcgatagctggtcctatgggcagatgcctagaatcaaggtgggcctcagaaatagggctgggtctccataaggaggtaggccacgttcagtccacccctagcatagatggaactggggtctcgggcaaccaggagttacaggaattttgctaaagattcccaccttccttgagtggggacacattcctctggttggagcttgttcccctaaatgaaaaatgtaatgcagtacatgtaggggccctactgtattctttttctgggggaaagctcttggtgttcacaatggctcaggcttacagtacctccagccatgtgcccatttccacaagtctttggggaaggccatgagctgagctgagagggttctctggggcctgggatgacttaagaaccaaatggcagataatgggatagggggcagatgcagaggaccaacgggaagttttaacacaaatccccttccccagatgatatggtttgcctttctgtaggtgggtggcccaggccaatttttggcaatatccttaacccacctgataggagaagcgccctcccctgcctgccttgcccattctacccaacaaggactccctggtgaggcccttcacttccatgtcacgtctgagctgcagctacagtctccttgccctcatggtggtcttcggcaggtgccacagggccccctccagggtcctcctggcctactgtcccttcccggacctcctccccactgcctgggccctcacccagctccaggatggtgggtaggtggccctgctttggggagcgcttgcgcaggctgagcaggaagggctggggcaaggagaagatgtccacgttgttgcccaggtcaatccacgtgacattggggaacttgctgggatccttaaggatgtcagtgaggtcgcgcagcacggcccgggtcaaccggttgccattgagtgccagtgtggtgaggcggggcagggtgctgagtgctggcagcagctgcaggaccatgtcgtccgtgaggcctgtgaagcccagctccacgctgtctacctgctccccacagcgctgtaggtagctggtcacccgctccaggtctcgggaggtcagtgggattcccgacaggtccactgtgttgtctggggggcttccggccaggacagccttgaggctgaagggaaaaaggacaaacaaggctcaggcacatagggcaggcctttcccccagaagctgcagtgccagcctctgctcggctctccgacgctagggactgcttttacgaaacacttggatgtcggatgccacaagtgcagaggtgggagcaaccagggacctcagtcccctgacactgccgcacgtctcagctgtcagggcccagctggccgtagcctgaggtatgtggctgcccctatttaccagaaaaattgagttaagagtaccattgggctgatatatggaagaagttcataagtgcaaaatggtgccttgtatagtaggcgagtgaggaataaacatttgctgctgtattcatcacctggactcagcttcccacttctaccaccctggggtggcagctcagcccccatgaatggcacaaaggatctctgagtcccctctttcaagaccatcttccccaccagagaaggattccctatggggagcctgtaagacagcaggcagggcagggctcaggggctctgagcctggtggcagctgctgactcctggaggctgagtgccttgctccttgcttctgcttgttcttgggacagagcccaggcagttcaagctgatggcaagtgtgcccttccctgcacaccccccaccccacccccgccatctgtttgctggctccaaggcccaggtgcagtggtgagatgttcattttccacatttttttttttttttggagacagtctcgctctgtcacccaggctggagtacaatggcacgatcttggttcactgcaccctctgcctcccgggctcaagtgattctcctgcctcagcttcctgagtagctgggattacaggcgtctgccaccacgcctggctaatttttgtatttttagtagagacggggtttcaccatgttggccagactggtctggaactcctgacctcaggtaatccacccatctcggcctcccaaagcattgggattacaggcatgagccaacacgcctggccattttctgcatttttttttttttttttttttttttttgagacagtcttgttctgtcacccaggctggagtgcagtggcgccatttctgctcactgcaatctccacctcctgggttcaagcgattctcctgcctcagcctcccgagtagctgggactacaggtgtgtgcccccacgcctggctaattttttgtatttttagtagagatggggtttcactgtgttggccaggatggtctcgatctcctgacctcatgatcagcccacctcagcctcccaaagtgctgggatcacaggtgtgagccaccgtgcccggccccattttccgcatttctaagtgtgctgggaaggagagggaggtggagggggctcccagcctgctccaagagcatatgctactgtcaacagctcaaaggtcatggcttgtacttcctggcaacacagggtacatttgtccttgagatctaagctgggaggctgtccacagtttgttcattttgactctgactggggtccagccccagggagttggaaagtaaaactctcaaggcgtgacatttaaatgcttggaatgctgccagccatctgtgcagcttgatttaactttggtgctattatcaatgtcattaataaagacccattccaccagggaagcagtgtggtggtgaacagcctgagctgggtttgaattcagccccaccacttaccagttgggtgatcctaaccagtcaattgacaacagtgatatctcctccctaatttgttcctttttgtttcttggagatggagtctcactctgttgcccaggctggagtgcagtggcatgatcttggctcactgcaacttccgcctcccaggttcaagtgattctcctgcctcagccttctgagtagctgggattacaggcgtgcaacatcatgcccagctaatttttttatttttagtagagacagggtttcactatgttagccaggctggtcttgaacttcctacttcaggtgatccgcccatctgggcctcccaaagtgctgggattacaggcgtgagccaccgtgcccagcccatttgttcttttaacaaacatttgttaaactcatctgtgtgccaggcagtatcctagacactagggtcacagtggtgaacaggatggacaaaatccctgttcttcctctactagggggagacagaccacaaacaaaaccctgagtgtggggcgatactgtagcgtggggctgtggctactcaggagaaggtagcgtgtggactgacacatgaaaaagtaagcatgggccatcaaaagagtttggtgaaagttccagcagagggcacaaaggccctgaggctggaaagggactggtgtgtctgtgaaccagcaggaaggccagtgtggctggggcgggagagcaggagaggtgagacgagggggcgaggagagcaaatcagaggcccatgcttggatttcattcaggtgccatgagattccacccgaggggaatgagacctcatgacatggcttccgaatgaagaatggactgagcatgggtgtgtgtggggaaccaggagaggcccttaggttccagcagagctcaaactaccagctttccattgctaaagaaccagctcagtctcatggcattccaggttccaagggccccccgtcttgctgtatccccatatatgtcccctctacccaggtagagcccctcccgtagccagcaccatcacagccttacactgttcatccacctgggaatgcgcctctccaggatccatctcctagttgtgggtgggggtggggggcgggtccagaacagaaggaggcaccagagttctttcttctccatgagggagggggacagcccttccttccccagcctgcagggacctgcagggatgagctagcaccagcaccaaggccttggcagagtctttgtgagggcacaccactcagctatcatttgcaaaaagacaggtgtgcttccttctccaggaagccttacttccaggctcccctctacttgcttcctacggtgttatcacagcccacaggttctgtgtcctacatgcccctcaacccctaccaatcttcaagggactctgaacccccttgttgctgtatggaccagggacagggctggggtctgggtccccctggggacatctgagataactgaggagttactagggagtgcttgttgctcaggctggagtgcagtggcgctgtctctgctcactgcaacctccacctccctagttcaagtgattctcctgcctcagcctcctgagaaactaggattacaggtgtgcaccaccacgcctggctaatttttgtatttttacagggtttcgccacattggtcaggctggtctcgaactcctgacctcaagtgatccacctgcctcagcctcccaaagtgctgggattacaggcatgagccaaacactgtgcttatctgggagtgcccactttagcacaccaggaattagaaatttctcacatcttcctcccacccaccagaccagggtccccctctagatgtttccccactctggaatcctccttccatcttacctccttcaggcagcttctatgaccaccccccatgactccgcccttcccttccctacatccctgggaggggtgccctgtaacacacactcagcctggcatagacctgcccgggggagtgtaactcaccaggcctgtggcttccttttcaccagcccccggtgccgcctccactgggagtgggggctgaggtggtatgtcagctgccggcacagcttctccatggcgcccagtgcatcgccttcctgcagaggcaaccatgggtggtagggccctgagtggctgggtgcaccagtctcagcccccaggcttcctgtctcccgggtaagagcccagctcccccaggctgagctgggggaggccctgctctgctggcctagggtgggcaccctaggcagacagcagtggctgcaaacagatctgcaggatggttttagtttttgtgaattagttgctagcattgaaaaacagatttatgtaagtctggattccaggagatcggacaaaagttggctggagccaagtgcctgctgaccccctggccaagactcaccatgatccctgccactccccaatgtccagggccgctctgtgcattctcttgctcagcagatttattgagcacttactcggagccaggcacttgttctaggaagctaggatatggccatgaacaaatgttcgtgtccttgtatttcacatagtaaaggggaaaatgagatatttttacctgtgtctccctcaaaagtgagaacaaatgaatgaggaggccaagtctttcccagcgcagttcattcacatgcgttcctgtcaggcccgttggcatctgagtttgaaaccctgggtgtcatgggctgaactgtatcccgctgacaatcacaagttgatgtcctaacccctagtaccttggaatgcagctgtatttggagacaaggcctttaaagaggtgactaaggtaaaatgaggtcagaggagtaggccctaatcctgtatgactggtgtcctaagaagaagaaatgaggacacagacatgcagaggaacaaccacttgaggacacaggaggaggagggactgacagacctaggagagagcctcagaaggaaacccaccagccagccttggacttctagccttcagagctgtgcgaaacgaactgtctgctgtttagaccaccagtctgtgattttttgttatggcagacactgggttaaatggtgcagctgaaagatgctacagactccaactacatccctaggaaagtcaatccaacagtccccggagccaaactcgtgctggacagggtgagggcatgagtccctccagggagtgaggaccaaaagcgtgctcctgccagtgggccagtgctgaggcttggatgcaagcgctgaggcttggatgcaagcgctggactcagatgcaaacccacatgtggccaacgactcggtgtggggaggtccggcacgttaaccacgcacagtgctcagcatggtgcctggagtgggtgctcaacaggctgctttgtcattacgattcccacacccctctgctagtggacaagcagtgtattgagtagtgaagagcaaagacctggggccaaaccgtggggattcaagtcctggctttgtcccgttctgtgtggccttggacaattgcttgacttctctgtgctccaaaccacatctgtgaaaggattacagtacagacctcacaagagtttctgtgaggattaaatgagtcactactagcgcagtgctttgaatagagcccaacccacagcaagctctccaggcacactctaagtgaataccgtgatagcggcaccagcacagagaattctggcagggcaaggagggaagatgacttctgcccaggctcagatttgagctcagctttattttaatttaatttaatttattttttgagacagtcttgctctgtcacccaggctggagtgcaatggcacgatctcggctcactgcaacctccgccacctgggttcgagtgattctcctgcctcagcctcccgagtagttgggattacaggcacccgccatcacacctggctagtttttgtatttttagtagagatggggtttcaccatgttggtcaggctggtcttgaactcctgacctcaagtgatccacccgccttggcctcccaaagtgctgggattacaggtgtgagccaccgcgcccaggctgagctcagcttttaagagcagatgggttagtgatttcagatggagaaagaaaacgtgaggcatccttgagtgaggaggaaacagtctgtggcagggcttggtgatgtggcggctgtggggtgtgttactgacatgagggcaggtgaaggcctggggcctgatcacatctggtccctccatggttcaagccactgtcagccctgcacaccagacatcacgcaagaaggttatggaattcccacagcaccccaaggcagtagatactttcgttattcccattatgcagtgggggagcctgaggcccagagggctggggatgggcttggggctgatgggaaggcaagagaaggagactctgaggaagggggacaagagagagaggagttgggaagatggcagttgaatgtccaaaggagagaggcatctgtggagggacccaggaagcaaaggagggcccgagactgaacagaacggatttggaggaggcccctgggctccagttcacagcccatccccacccctgcccccagcttcctggtgcctggctgtctgatgaataagcttgtatcacctgccacttgcacctgtatcacacctgtgtgttacacctgtcactcctgtgtgtcactcttgtgtgttgcagatgtgggggcaggtgagcatctgcctttacggcttcattccccacccctggagctgacatcttttggttcctagacttagcttcttgctgaacctggccacatgactgtgtggagggaagcaaggcgggtgaagcaggaggagctggtcatgggggctgcaggggagtccctcaagggggatgttcctcagactgggagatggagagaggggtggacaggaggtggagaggatgactcagggccaggctattggaaggggctgaggggacagaggccacacagctgactgatatgctggatggagaaggtgtgggcagggagggtgaggagggtctaggctttgggcttgggacatgagtagaaggcaaggggctcaagacaagaagtgggtgagaaggcaggaggggggtgacctgctcatgtggggccatggtaagtttgaggagctcacaatacctccagctgtggatgccactggacttatggggttggggctcaagacaggtccaggctggacacattcatcagtaagattaaacccctggccagagaatgagctaagcaggagggagagagaacagtggacacacagcagtcagagaagactccatcagagcagcaggagtagtggagtctggacaccaagaagagtgactaatggggttagacccccacccagaggccactgggtctccaacaaggaggccatggccagcacaagttcagggagtggggccatggtgggagccgaccttagagctcaaagggagaataggggccaggcacggtggctcacgcctgttaatcccagcacgttgggaggccaaggtggatggatcacctgaggtcaggagttcgagatcagcctggccaacatggcaaaaccctgtctctactaagaatacaaaaattagctgggcgtgacggcgggcgcctgtgatcccagctgctccggagtgctgaggcaggagaattgtttgaacccaggaggcggaggttacagtgagccgagatcgcaccactgcactccagcctgggtgacagagtgagactccatctcaaaaaaaaaaataataataataataaataaataaaacagagaataggaggtgacactggagatggcccatctagagctgtgcttctttaccttggaatctttcataccggaatctcaggggagcttttttttcttttttttgagacggagtatcgctctgtcgcccaggatggagtgtagtggcgcgatcttggctcactgcaagctccgcctcccgggttcacgccattctcctgcctcagcctctccagtagctgggactacaggcgcccgccaacatgcccggctaatttttttgcatttttagtagagacggggggtctcactgtgttagcgaggatggtctcgatctcctgaccttgtgatccgcccgcctcggcctcccattacaggcgttagccaccgcgcccggcctggaatctcaggggagctttaaagtccactgatgggccaggtgctgtggctcactcttgtaatcccagcactttgggaggctgaggcaggaggatcacttgaccccaggagttcaagactaccctgggcaatatagtgagacttgctctcaaaaaaaaaaaaaaaaaaaaaaaaagcccatcatggtggcatgtgcctgcagtcccagctacccgggaggctgaggtaggaggctcttgagccccgaaagtgaaggctgcagtgagccgtgatcacacctctgcactccagacagggtgagacctagtctcaaaaaaccaaaccaaaccaaacaacaacaaaataacactgatgcctgggccaccccaatgatgggtgggtggctcaggcacagggatttttttttttttctttttgtttgagatggagtctcactctgttgcccaggctggagtgcagtggcgcggtcttggctcactgcaacctccatctcccaggttcaaacgattctcctgcttcagcctcccaagtagctgattacagacgcctgccaccacaccccgctaattttttgtatcttaatagagatggggtttcaccatgttggccagcctggtctcgaactcctgacctcgtgatctgcccgcctcagcctcctaaagtgctgggattacaggtgtgagccaccctgcctggccacacggggatttttaaaaggtccccaggtgattccctagtgcagctgaggtggagaagcactggttcaaagaccatgggtgggatcaggtggtctgcccagcatcactcctggaaccaccccaggacagaatgtagccagtctccaaagcttagaactgagcccctcagctgcagctcctccttcaatcacttcccagggtttccaaaatctggggccaaaatccctgtccaccctctcagcctgggcagctgagccttaaaagaagagaatagaggccgggcgcggtagttcacgcctgtaatcccagcactttgggaggccgaggcaggcggatcacaaggtcaggagttcgacaccagcctgtccaatatggtgaaaccccatctctactaaaaatacaaaaattagccaggcgtagtcgtgggtgcctgtagtcccagctacttgggaggctgtggcaggagaatcgcttgaacccgggaggtggaggttgcagtgagccgagatcgcgccactgaactctggcctgggcgccagagtgggactggtgtgggactcctaaacacacacacacacgcacacacgcacacacgcacacgcacacacgcacacgcacacacacacacacgagaacagaggacaagggggcatcactgcactgccattgccacaagggggcagccacgcacagggccaggctcgggatggaagtgtatctgccactaccagggagaactgaggagcctgcgtctcctcactggctagacaggaacaatagatatggacacctcatagagttgccttgagagcacaagtgagctgatgttctctcaggagtgagagttcccttctgcttgtctgaactaaactgacaacagctaacatgtattgagcagctgcgatgcattgggcatctcctctgagcactgtttgcatgaacattttggggctcagaacacaattccaaagcatggcgccggggccagcagagagctttgaactaacggaaattggaaggcctcagaagcaaagtttttctgcccttctgctgccctcctgtctctggcccttcttctcccccagagtgagtcagagaaaccagaattcttcttccccaaggcaggtcacagagaccagaacccctctccctcaaagcaagccataaaactaggcaggtcactctctcccttctgtcttgaagaccattccagaggggtaggaaggaacactgcagagagaggccaagaagaatctgagcagatagccttcctgggtcccctcggcctatcaccattagatcacaccctttgtccaatcgcatttctacaagcttgtgcactctttaccaagcctgagtataaaaacagatagctggctgagtgtggtggctcacgcctgtaatcccagcactttgggaggccgaggtgggtggatcacctgaggtcaggagttcgagactagcctggccaacacggcgaaactccatctctactaaaaatacaaaaaattagctaggcatggtggcgggcacctgtagtcccagctacttggtaggctgaggcaggagagttgcttgaacccaggaggtggagggtccagtgagccgagatcacgtcattgcactccagcctgggcaacagagtgagactctgtcaaaaaacaaacaaacaaacaggccaggcgtggtggctcatgcctgtaatcccagcactttgggaggcagaggggggcggatcacctgaggttgggagtttgagaccagcctgaccaacatggagaaaccccatctctactgaaaatacaaaattagccaggcatggtggtgcatgtctgtaatcccagctgctcggaaggctgaggcaggagaatcgcgtgaacccaggaggcagaggttgaggtgggccgagatcacgccactgcactccagcccgggcaacaagagcaaaattccgttttaaaataaataaataaatataattaaaataaacaaattctaacaaacaaaaaaccaaaaaaacaaaaaaacctctttccctggggtttggggtcttcatttctttctttttttaaagagatgggggtctcactatattggccttgctggtattgaattcctggactcatgtaatcctcctgtatcagcctcccaggtagctggggctaagggtcctcatttcttttcttttcttttcttttcttttttttttttagtgacggagtcttgctctgtccccgccctcaggctggagtacagtggcaccatctcagctcattgcaacctccgtctcccaggttcaagtgattctcctggcttagcctcccgagtagctgggattacaggcgcgtgccaccacgcccagctaatttttgtatttttagtagagacagggtttcactatgttggccaggttggtcttgaactcctgacctcagacgatccgcctgcctcggcctcccaaagtgctggtattacaggtgtgagccaccgtgcctcacctgagcgtcttcatttctgaaagctcccatgttgcgtaaaattttgattaaacacatttgttctgcttttttgttaccctgtgtctggttataggagtgtcagccatgacccttataatgagtgagggaaaagtaccacacagttctgccctacaatttttttttttagacggagtcttgctctgtcgcccggctggagtgcagtggcgcaatctcagctcaatgcaacctccatctcccagattcaagcggttctcttgcttcagcctcccgagtagctgggactacaggcacccgccatccatgcccggctaattttttttgtatttctattagagacggggtttcaccatgttggtcaggctggtctcaaatcctgacctcaagtggtccacctgcctcgacctccctaagtgccctacaaactatagtcccataccttactacaaccctatgagacaggtattattaataaccccgctttacaaatgagggaactgaggcaaaaagaacttaaatagatgggcaaggcctcccagcttgtaagacggagtcaggatctaaagtcagccagctctgaggctgatgctcctaaccgctatctgctgccctccttgtgagaaatcctgtctttggcttaggtcagttcaaagtgtttctatcatttacaaccagaaaagccttcagtgagactgtctcattttttcccaactcttccacttttcaaagaacccctccagggctccctcctgcagagaacaggactaggcagcactggcccagaagtggagcagtaagaaggtggggaacggggggagggagaggaggagaaggaggaagaggaagagggagaggaggaggaggaaggggagggggaggaggaggagtagcagtagtaggaggaggaggaagaggagggagaggaggaggaagaggaggggtaggaggaggaagaggaggaaggaggaggaagaggaggaggaagaggaggaagaagaggagaaaggaggagaagaaggaagaggatcaggaagaggaggaggaggaagaggaggaggaagagaaggaagaggaggaggaggaagaggagaagaaggaagaggaggaggaagagaaggaagaggaggaggaagagaaggaagaggaggaggaagagaagaaggaaaaggaggaagaggaggaggaggaagaggagcagaagaaggaagaggaggaggaagaggaagaagaggagaaggagaaagaagaggaggaggaagaggaagaggaggaggaagctggacttgacactgagacacacataccctaactcctccagtggctggaaccctgagaagtaacctgggagccatagctagccacattccctaccatgcggcagggggaagagcagtctgtgcagagggaacacagagggaggcagggtagagcagcgaggagggaaggagggacctctgcaccgtgcttatctatagttctagcaccttggtctaacttggctgcccgtgggcaccacaagacacctcgatatctgtagaacacattttcttccttgctggagccagcccgcctgggcttctgttatgtgcagcagaatcctaacccgcccagaaggctcaatggctgtgtgctgaatcaatgctttgcagtcctcccccgatccctgaagatggcaggagtgggatgtggcacagtcaagtgactatgagtgcaggtcagggcagcagcctctccagaccttcccagtgaggctgcccaggtcctggggcagaacgtgtttgaggggcttctcattaatctgtcaggaaagatgacgtgctgacctgcaggctgacctgggaggggtaccagcacccgacactgctctggctctcagccatcaggcagtgataccatctgccatcttcactccccaggcacctctgtaactgctccaggaccccgacaagcacagccctccactgccctccattcaaggctatccctccctcatccataaattcattcatacattcatcaaatgttgactgtccccctcattacactggacaccattccagatgcagagactgtgtgccggcttttctgtttcctcttgccccacagtccactctgcccttctctgctcagaaggctgggctctagagactgcatcactgggctctcttccccctggcttccacttgggttcagctaatgggagcaatggcagcaagaccagagggcaggaggagagacggatgggggagtttattctgattcccccacttcggcatgtgcagccgccggcctccaagacagccttgctgctctcggctcctggcatctgtgcccctgtgtaatgtccttccacattgtagcagggctggtctaagtgagcaacagaatcattagaaccaatagaatggtggaaatgatggtttgtgacttctgagactgggtcttaaaaggtattgtgggggttgggctcacacctgcaatcctagtgctttgggaggccaagggagggggattgcttgaggccaggagtttgagaccagccttggcaacatagtgagtgccccgtctctacaagaaaaaaaaaaacaaaaaattagctaggcatggtggtgcctgcctgcagtcccagctacttgggaaggtgaggtgggaggatcacttgagcctagtagttccaggctgcagaaagttatgatcacacctctgcactccagcctgggcatcagagtgggaccctgtctcaaaacaaacaaacaaacaaatacaaacaacaacaacaacaaaaaagcaaggccaggcatagtggctcacacctgtaatcccagcactttggaaggccaaggtgggtggatcacctgaggtcaggagtttgagaccaggctggccaacatggtgaaaccccgtctctactaaaaatacaaaacattagccagttgtggtggcaggtgcctgtaatcccaagctacttgggaggctgaggcaggagaaccgcttaaacccgggaggcagaggttgcagcgagtcgagattgcgccattgcactccagcctaggtgatacagcgagactctgtcaaaagaaagaaagaaagaaaagaaaggaaagaaagaaaggcattatggcttctatattatcacctgttgtgggataagccagctgccatgatgtgaggacactcaagcagtcccatggagaggctacagggcgagtgtgccgccttggaagtagacctgccaacttctttttttttttgagacggagtttcgctcttgttgcccaggctggagtgcaatggcgcgatctcagctcacggcaacctccgcctgccgggttccagtgattctcctgcctcagcctcccgagtagctgggattataggcatgcgccaccacgcccggctaattttgtatttttagtagagatggggtttctccatgttggtcaggctggtctcgaacttccaacctcagatgatccacctgcctcggcctcccaaagtgctcggtggcctcccaaaggtgtgagccaccgagactggcagacctgccaacttctgttaagccttctgacacctgcagccctgaccaatgtcttgagagacccaaagctaaactacctacttaagcggcccctgcaaacctgacctacagagactataacaataaatgtctgttgttttaagccactaagttttggggtagtttgctatatggcaatggataatgcagcgtggctctggaccaggtgttctcaccctgcctctggcaatacagcttgtcctcctgtgaaacaacttcctactactgctgtctttggatgtctcaatgtcccctgttgacttcctttatcctgtcctcaaccctttactaaactctcttcaaacttcacaatggaatatgttgcctgcttcctgcctggtgcaggttggaattatgaacaagacagacacccttcccttcagagtttatattctagtggggaaaacagacaataaattagccaacaaataaataagcaaggtaatttcagagaccagtaagtaaaacagagaaacgaatggaaaaataaatggggctcgagacaggctgatcaggagcctacactaggcaggcttgtcaacgaaggcctctcagaggccgtaggctcagtctgaactcaggagaaggcaactcagacagaagaggctggagcagtcaaagggagcagcgacgtccctaagataggagagggtgtggaggtgtcaggaacagaggagggaggcccacgtgctagagcagagctcgcagggtggcaagtgggagaggggagctcaagagactcaggcaaagccagatgaggagtttgggttttgtttaaactacagcacagcccctcactaaaggatgttcagtgaggtccgtgtagtatccaatttacctttggaacgagctctccggtcttgacacctctgcctataatctctagacccataacgtgggctgacatgaacttctcagatgcaaattgctctgaccaggatgtcctggtcagccctctggggtggatggaggggctgctcctaccaccagcctggggacctcccacccctgcctcatccagagagcctcgcttgccacatgggcacgaaaggggccttccaggtctctgggctttagcagggctcacccactctggctggctctgattttgttttgaggaaaacaaagtccaggtgttgaagtggtctgaggaaggttacaccatgcaatggactgaatgttggtatctccccagaattcacgtgttgaaacctaatccccagggtgatggtatttagaggtggggcctttgggaggtgattaggccaggggggtggagctctcacaatgggattcctgctcctttgcccatttcctgccatgtgaggacacaggaaggtgactgtctgtaacccagaaaaaggtccttgccagtcaccaaccaggctggcacccagatctcagacttccagccttcagaagtgtgagagataaatttctactgtttgtaagccacccagtctacgataatttgttacagccacctgaatggaccacaacaacccaggtatgcaccccctggccccgcctctacccagatggaaagggaagatcagaaggcaggagttcccgcccctcctcctggccttgcctggtcctgtctcacagggtctcacagtggcccttacccactccctggcctgcctctctctctgagagggtgggtccttctccccacacaggctgtccatgaggcaacctgtgaggggcaggttggggagggaggggagctcggctgctcccaccaggcccctcctcctgcccccatgggcactgaccacccagggaccaccggcctgtgtcccgcccggctctgggtcactgcataggcccaaatcacacctgtggttctcctcggaggtgtaaccttgctcagatcacttgattacctgaattttgttttccttaactcaaagatgggcatatacatagccctcctatttcttttttgcttttttgagagccccatcgcctttcaccctctcatctgtgagcaactccattgctgctctaggaaaggcagagtctggcacctggcaaggcctcctcacaggcctgactcccgtcccttcccacctccctaggcagaaccgggtggaactgcatgagaagcgacggaggcgccagccccagccagctccctgtggctcctggcaccaatcaggcctcgaggcttcctcaacaccagctttccttcccctcccattgggccctgcatccctgccttctgcaacattgtgctcctgaccctggctggctcccagccctccacagctgggccccacctcagagcctttgcatcaggtagccccagagtcagagagaaggcccccgacaaagccgcagatggagctcagccccaggaaacacctttccagagcaaggctccagctcactgtaggaccacagtcaagtctgtatccaggccgagcgacaggtgggcttgggaaccatctcactcccggcctagatcctacaccaaaaggaaaaacttccctcccacaccccttcgtcctgctctggtttcctgactgccagtggggaagcacttcttttggaagccactggaaattgagggatgagacagaaaaaaaccaaagcaacagagaagcgctcaagtgtggaaatgtccccagccggccctccccttcccgccaggtcgggctgcatagccctgggggagcctagacctggagctgcaggaacatggcagaacctcccatccaggcagggctgagctgcagatctggagcctggagagccatggagctttcccttccgagctcccagggccagtaggaagaagacatgagtgaaggggtgggtgtcaaaggacactcagcctcagaggtgaagacatctgggagtggtggggactgaggcaaagcggacagccccatgcagggccccggacggccttctatgacacctttgtgcaaataagaaaaagttcacctccagggagacaagggcttgcaccagggctcatggcttggtgggtagagagagggctggatttgaactttcccctgcctccccctaccccactacccctctgtacgcatgctttcgtgcaaggtacaacctgtacaactgtatgtggtggccttggccccatataacagggatggctacttagctccagccctgcagaaatgagggcttcatgttgctggagcttccagtttttcaagggcagctgaatacagggatcatgtgaaaaattctggtttttaaatgttggcaatgaattcaccccctgggccaaacaaaaccaatctgtgctagtggcaccaagggagagcacctcaagctcttggtgcctggaggacgggcttgtcctccttgggcctgtctgccagtcctccttgggcatacagctgctctgcccagaaaggcacccaccgcacaccccgggacctggctggctcggaccacagccaccctaccggcttgggacagtggatgtagcgtgccaggctgatgatgaggtcgtgtgtgatggggtccaccaggttccggaagctggcgtagcgatacagaacgtcgtctagcgaggtcgactccatgcccaggtcctgcaagagcaaaggatgcccagaggtcagggctggctgcccacccagctcgcccaccatccccaagagaagtaggcacagacccctagaggcgactctgcctcccagagccccggtggggagcatctgcagaacttccctcaggggctggggcaggcctctcctgtttgtctttgcctccaagttgaggaagagcagggactggcctctgcaggctctgcagtttgtgcaggtcctggcttgtggccctctcctaggacagcccctgacctttgtctctctggttttccagaggaggaagccaagggtggcctgcctcggtgcaagcagctgcttctctatggtggcaaaatttggaattaactgccttgtgacaggatggtttaatgatatttatttgtgttttcttcctgcttctgacgttgtttttactgctccttctgtagccgatgcagcctcagtgttcctttgccttgggggtttctgagtggtggggttgtaagcagatcctgccaggcacccagaaggaaacctcatcaggactccctcagaaaggtactgagtggaatcttcccgatgggaggggagcagcttggaggcgagtgctactaagtgtggtggggccgcggcagaaaccgctggagcagagcttccctgggtctgaggaaggaattgggtttgggggctcaggacacaccaccccagaatatggtaccctggcatctgaggaggcagctgacacaggaaggtctctctgactgctgttctcccccaaagcaggccctgaagaatcctgtgaccttcatctaaagtaggtcatgagacccctgagcttaaaacggagtgatcggctttggagaagtaaggagacatgacgtgcctgccctggggtggggactaaacttcgtgccactccacgtgaaagggggaggtacgcctgctccctttcctcaagcccccccctcccaatttctgccatccttgggtatgagctacacgacagtccctgaccctagcttggtgccctgcacagaccaggcaatgctgacattcccatccggagactgtcctcacaccatcctggggaacatgagacatccctgggtagggaggcaaagcaggcccacccactgcaggctgtcctcattctgggggctcccacagctgccccagcacagcccagagaaaggctcccagcccaggtggctggggtccagtgccctggggacgggacgtctgggcagggaatgtgtgggtaaccagctgagtttgctccttgtcattttgtttgtattctgaacttttaaaataccttccccacatgattcttagaaatccctggaaggcacgcaggctggacatcatcatatattctctacagatggagacaccaaggcccacgccttctgtgctgttggaatttcaggaaggatgggggtggggcacggcctcagccctgggcatgttctgcagattgcactgctcttatctgccagggggtggtgagagggtggctgagctggacagatggcgggcagggacgggctctgcggtctggcagctgacattgatacaagcaaaaaaagagtctttgctgggggctctggagggcctgggtgtcatgcctgggggtgggaggagcctcttgtggggagccccttggagcccaactgccagccaggtcctacctgccgtggttagggggcactctgcccccaccctcattaacgcctcagtgaggacacaagaggccagttgtgagggctgttttccatatggcaggaatgaaccttggaggcgaactgccaggtcctgtgccaggctctctggctgctgaaaaaatttgctgggaaccaggacctgggggctcaaggtctgtcatggatgcagtcaggggaggcttctgaagcactggctggtacaggttctagagctgcacccccttgtagaagcaggtacaatacccgcctttgacctctggccctgccctggctttttcaatccctcagccagggctgcatcctgaagcaagcaacctgacaatgctaagcctcagtttcctcatctgtaaaacggggacagtgaccccagcatcacaaggaggcaaggggaacaagaccaagtgttacatgtaaagcctctggcagggaacagagaaagcagcagtgccctttctactacatttctgccccctcctccctggaaggcccgtcctcaccttctgcaggggttctcgatctcctggaccacagacccaattgagaatgtgtcaaaagccatgagctctctccctagaaaaattctggagtcagggctgggcggggacctgagcacacagagtccacactggcctcatggtcaggagggtgtgtcagagccgtgtggacacgagggaccccgggacacaaactatcacccactaatgtgcaaaatcacagccctgcctccctgaggcgggaggaagctggggacacaggaaggccgaaagtcaaaggacttgtgttctacggtctcagagggcctgtgtggtcaaacgagctgtggcccagtgcctggtttgccagccagtccctgcctacagcttgaggctccccttcctggggacagggagctggagaaggagggcagatgaggtggaaacagaggggtggttattcccatggtcagaggctgcactggtggccacggggaggaggccagaggcatggagctatttttcttttacactcggtcgagcaggctgggctgctcctctgtggttggcaacttaatgccagcctctatgcctcctctgctttgcccctgggcacccctctcctctgtgagcacccctggcacctagtggtctcccccttacaattgtccctgcagtctgtccctaaatgaccctgggaaatagcactggattttaggccctggccagccccaactcgctgtaagtctgtggcaagagacttccctcttgggattcatttccctatctgtgaaatgggcagatgaaccacactagtggttattaaactgtgttccaagatcttgaggctgacggtcaggggctgcggtagacgagagaggtgagaggaaccagcagggctgtgggctgcagctcttacaaagcagctcctggttacaaacaaatgaacgcagttctgttccaaagaaaagcttgaaagccctggaccagatgactgcctgggtttcttgtgttcctaccagccctgccccatcttcctggaccccctacatctccaagctagtctaggccatccctggaaggaccaagaaaatcccagttgccaacccaggaggttgggcaggtctgtgaagatgccaaatgtcctttccggagcccactcccctgccgtctccccgcgccatccccctggttgcccagctgctgactgtggctctgcctctctggagcactgtctgggttcatgtggttgttgcttaggaggggaaaaggagtgtagaggcaggatgggagggaaggaggagggtctcctagaaaggcagctcagggtcactgtgagtcacggccaacaccggcccgccctgtgaattccagctggggtggggctccccaaggtcccagggctacaacagggaaagccagatagaggctggccaaaggccatggcacacattattgctttattgctttatttcaaccccacctaggcccacaggatgcttgtgctaactgagggcacttcatagtcctgaggaccttgggctacttcctgcctccttgatgtcctctccatcccccctcccctaagccaggctattggagatgatggtgtcaccagctgctgggactacccacagggctgggtgtgagggaggagaggtcaccagatcctcaggtgtctcaggaggctgcagcctgggccacagccctgggaatgggctcctttcagactcggcacccatggcctgccctccttctcaggaagacacagaatgggggtaggcacacaaggcctgctgcatgtgcaagggaagtggaagaatcagatccaggtgtggtccctgcagcccctcctgtgcactgtactagtcttggaggggctggtttgtcttaaaaagcacaaggcattgaggacaatcccattttcctcatgataggtctaaacggtaccacctctaggaactgtgcctgtggacagttcctcatcaggatgtctgggaacaccagcaggtgcacctgagtcactgctggtggggagtgacgctcggagagtgtggctggcctgacaccgagtcactctcggctccctttccgagctgccggacccagcacacagcagcacacggcatttcaaagaagggggccctacataactggagcttggataaacaggtctggggactcgctgcaatgggaagagatgatgggcttgggaataggggtgcatgtttccaaaaagtgagtagagatttacacagggcagtcagaatggcatttctcaaagtgtggtctgtagactttggggaagcacccttaagaccattttaggggtgctgtggggacctcttttccaatgacatatctatgtgatgccagattttcttcatagatgtcaattaaaacaacctgtcgcaagacccagtgcaaaagcgcaagtctgatagccgtcttctagaaagtgagactaaagagagtcacaaaaatggggagcaacaccactctcctcacttggtttttcttttcctttggaaaatatagttattttcataaaaatttattttttcacttgtgaacttgttattttttattttgagacaaggtcttgctctgtcacccaggctggattgcagcggtgcgatcatagctcgctgcaaccttgaactcctgggctcaagtgatgctcctgtctcagcctccagagtagctgggactacaagcgtgaggcactgtaaggagctgctgttattttttttagatgtgaaaacaaccctatgaatgtaacagctggcattttgcattcacgtgtgtgcaaggtaatggcatggagtgtacatgatcactgccactcactcgttgatgcctccccacagttggactcacaccttcactctgtattcctgtgcagtagggaagtcacccagtacatgtttccccccaggaggaatacacagatgctttctcttctgagctctggcctccctgagaattccttcatgttgatgacacacctgaagacaacctggctcaacagaaactccctgcaaaatatcgcagacttggctaccctctgactttcagtcctgcagatgagaatgaggctatctgatttttgtttctttagctgcttgttcggccctggcgcctgtagggctgtccttgccacaaaaccccactgtgcctactggacagccctagcacactgtcctcttcctgggaatatcagttcagcatataggaggcctctgaagcaactgatatctctacagcaacttctccaagtcaccaaagggacatctcattcttgacatcgcccaaactcctaaaatcccttccctgtatctttcttactactccaacatcccccactttctcatttccaccctgaaaacccagccaaaatctttctaatacaaataaacttaacttctctggccaatccagttctcagatccaaaaagccccgtaaaatcccagaaaataacaagggttggcaagaatgtgaagaaactggaaactttgtgcgctgctggtaggaatgcaaaatggtgcagccaccatggaaaatggtgtggcagttccttaaacaaattaaacacagaattgccatatgatccagcaattccactcttgggaatatataccccaaagaactgaaagcaggcactcaaacagcagctatgtttccagcagcatcattcacagtagccaaaaggcgaaaacaatccgggtggccatgaacagatgaatgggtacacggagtgtggtctagccacgcaacgaaatattattcagccttaaaaaggaaggggattccaacacatgctacagcatggtgaaccttgaggacacagggacaaataagtgaaataagccagacacaaaaggacaaatactgtctggtttcacttatatgaggtatgtagactagttaattcatacagacagaaagtagaatggtgggtactaccaggggctggggggaagggaaggaggagttactgtttaatgaggacacagtgtccgttttgcaagatgagagttctggagatcagctgcacagtaaacagtgtgaatgtacttaacaccactgagctgtatgcttaaagatggttgagatagtaaattttatgttatgtgtattttaccacaaattttaaaaggggccaggcccggtggctcatgcctgtaatcccggcactttgggaggctgaagcaggaggacagcttgagccagggaggttgaggctgaagtgggctatgacggtgccactgcactccaacctgggtgacagagccagacccccaggcaggcaaacatagacaccttcttgggataggagggggcaggggagggtgcacattctatctggccattctttttctacccctgacacttggttattaaacatttttgccaccatgtgtctagtggcggatctgtttcctttggatttactttcaggtattggtctgcaaacacagaccttttttcaagctgtctcttcctcaggaaaaccaacactggctctgtgtcttctggatttatcttttttggtattctgtgcatgatacactttcatccagggtttccagtttgccttccatgtcactgatttcacatccagcatcaccgctctcactgcccccaagaaggattgtaagtcgcctagcatttcatttccttgcaattcttattttgcttgttaatctcccctttcatctcatcctgttggttttcttttccatcacagcttggcctctttgggtggccttttgttcttttcccacaaagttcatttcttctggatcgtgctgtagatcattttcagaggtcggggttcaggttccagggtatctatcctacgctcaggcttcccccctccccagcttgtgcactctcaaagaggccaagatctagtgacacccacgtctatcagcgcatccttgtccccatgacggcctccttgggttgggactgagtccacctctcagggctctggcttgcagaagagtccagccccaggatgagtctcaggcactgtgcttatgtgactctgaccttgagaagggacatcttcacccacttcatggcctgaatctccaacactcacaacagtgaagtccatggaaatctataacaatgtctgtatgttcaggacacttcctgtccttgggtaagcccactggctggctgcactggacttctcagatgccatctcttcccgccttgggagttgctgtctctgaaccgatgcagacagaggcatgggagaggatgaagggagaggggagtggaagagccctccttttacctccaaattgtcacttgcgtggtacaggaccagttgcctggctttctgattggcacagtccacagactaagggagaaagtggcttcctcccttccttccggaggtctcagattcctgggaggaaggctgcattgtgtctttcttggccctgctccatgtgtctagcagtgaggaggctcctctcagactgcccacctgtctttgtttccagtgtgctgagtgtttgtctttttttggtgcatcgtcttaggtgtcttaggggaaagctaggggaagccacagaggaggccgtcagccatactctattttaaacctcaactccccccttccctcttaaactcatttttaaccccactcccagaaggaaggccccgcgggaaattagctttcatttgtctctctcctccaggcatgactccacagtttctgcaacaacagagccggggaaaggaggacgcagcaagcgctgaatattaaccagcaaaggtagatgcttcaatatcgaaaccaccgggacccgcatgtgcaaagctacttaatgagggtgtaatcaaacacagtctaccagaaggaaattaattagagtccggagagcaagcaggaagcagaaccaggctgctccccctcctggctctagaacatcactggcagccactgctaagggagggacaaggctgggggatgccaggcctcagctgggtgccagggctcctgtcctcttccccgtgacattccggcttgcctttgggggacacccaggggagggaagggaaatgtcaggtgctgttagggaaacacagcctgaggaagcccccagggagagaagctgggacatcccagagttaaggagctgggcacagagaagacttgcttctctaggaagacaatggtctcataagaagaaggacggaatcataaacaacagaaatgtattctctcatagttttggagaccagaaatctgaaatcagggtgttggcagagctgcactccctctagagattctagggggagacttcattctttccccatgtgcgacaaggaagggagggatgccaggcacagacctatgcacctaatgagagaaacagatacaggatgcagtgggatgaatggtggcccccaaaagacatgcccatgcgcttgtgcccagaaactgtgaatgtgacctcatttggaaaaagggtcttcacacacagattaccttcaggaccctgagatgagatgatcctggtttatccaggtgggccctgaatccaaaacaagtgttcttacaagagacacagagaaggcagcaatgtgaaggtggaggcagagaagggagtgatgcggccacaaccaccagaagctggaagggagaaagagtgaaatctcccctggaatctctggatggacacggccctgccgacactctcatctcagacttctggcctccaaaccatgagagaatatgtttcggttggtccaagtcactcagccagtggtcattggttacggcagccccaggaaatgaatgcaccagattggatcaggacagaggtggcatttttcccaggggcacaccaggcaaaagggagaagagatcaaggcaagtggccgggacccctcccttcttccacagctgcagacctcagccaagagcacagctgtgggcaaccaaggacgttattgccagaaatcaacttgctgtctccaccagccctgaagcctctgtgggtacactctcctttgctgtctgctcccaggggcagggctgtactagtcagaaatgcttcctataggatccccaaggtggttctcagctcaacatgggaaagaacctttaaaaacaggtgatgaaggaaatgctgacactgtccacgacaaggatgaggcttgaagactccactaagagaaataagctcggaacgagaggacaaataccgcatgaggccacttacgtgagggaccaagagtatctaatcattcaaagtactcaaattcacagagacagagggtaaaatggcagttgctgggactggggaagggggaattcgtgttgggtggggacagggtttcagtttgaggaagatgaaagagttctggagatggaaggtggtaatggttgcacagcaatatgaatgtgcttaatgccactgaactgtgcacctaaaatggttaaaacggtattttatatttgtatattttatcgtaataaaaaaatagtgctgagctcactgtcactggaaggatacaagcagaggagagacactcatcagccggcactgctgaggcaggatttctggaccacaaggaaggtggccactaagggttgccctctggccccctgtgactcttctcatcagcatggcccaggatgcagcatcctggcatccaaggaggtgccactaagtagctacaagatgtggggcctggcgagaggaaccacaaaagaacgcagaaaaaaaaagcaacaaaaagccagtgacaaagctgcgtggatggcggaaggcgagcaggagtttggtgatgcagtttgaagaccgggactgagacccccccactggaggggtacgtggggtgcaaaagcagaagtggcaccagtgggcttgactgctccagagaggggcattgctcctcagtgcagcaacaaggcgcctttagcccccttgtcgtttttggccccaaaagtgccacagttacacagggtggccctggagcaaagtgagtgctaatgcgctggggcatacggaaatctggtatttcacacatttgtcatgttaaggagaattaggcgtatcagagtatctaacagattggccttccaatccccatttaaaacgggtaattgagtagctgattttaagcttatgattttaagcagaacaccggaagtggattcagccaagtttgtaagttttgaaatgtttcagagaactaatagtcatcatatttatcagcttattaaatttcaagaactatttaggaacccaggaaagtcctgctttttaggatgagtatttataaacttaagaacactggttatgttaaatttataaagttacatcaagatatttaaagaaatttaattacttaagttataaaccccctacccttgaacatcgacatttaaatggactagattcgtgaggggaataatgaaattggtatgttaaatgcttcaggaaacactaggtttaaaaatttccacttcaatatatattgaatattgagaaaattcaagtcgttgtaagtagtctgtgtgtgtgtgtgtgtgtgtgcgcgcgcgccccaagaataactaatgacagataatgcagatgaggtgggcaccctgcagagtccagggcagggagcatcagcacagctagacagggaggactatgcagttaagagcccgaggcacactgctcaggcttggaagacaccaaagcaaagcagactagcaaaagtaataaaagcaactgctacatcccctccccctaacaaaaccactggacggcatgggaaccctgtttgaaggtgaggcctcctcacagtcctgctgatgtctaaggtgggcattgcccggctcctggtcccagtcttgggggttgcctctcgagggcaccctggcttggtgcccgccacccccacaggcctgtgagtttggtacccaaggaggtgtccattagcacccagctgaccgaagtcagccagatgctgccagggagggctgctctgcagaggtctgagccaagaaactgctggtggggggtcattggcacccactccccgctccaccagacttgcccagcctgtctgagggatgagaggtaaagactggggttctctggtcccacctgagggtccaggggcagctcatgactctcccacctgtccaaggccacgtggcccctgcaggtttttgaagccaggcaccccggcaggctggccctcctcgacggtgacgagtgttgccaccaggtctgccttgcccagcaggagtcagcgggctgggcagcgatgtttggcagctttgctcagtgaggggcttcatgactgtgtgttgtttgtgttttaactttgaagtcttaaaaaatgacaccctctgtgtgaaacaggcctctggaaacagatgcccagccgttgccaagtgtaacttaattaaaatccgagaaacggctttagcaacaaataaatatcaaaaggatgctttctcttcagaataatctaaagtaagttgggaggcgcatcaagccatatgaagggttttgtctgctcctccatggtcatggctctgcccacacgtggctgacggtgggggacagacgtgggttagatcctaagtcactgtgtggccctgggcaagccaccctcctacaccacagcttccccacctacaaatgagaaggttgcaccagctcattcttccagagttggagagggcagcagaagagggacttggaccaaataggtttggaacacaaagaattcaacaaataaccattttccttttcctgctggacgtttcagctactgttttatgactccgaaagggtggtggcatttgcagtatttcccagatttatttcccaagcacctcccctgcttccccaggacctcttgtgggactcagattctgcagtatgcctggggccagatggtctctgaggtccacaggcccctacattccacaaattctcagcactttgtcacccatcccagcgccctcctaatctctctgcttgggaaattatctgaatcggttgtttataccttctggcaaatgcattcaagtccatttgtccctctctgcagtacattctgcccaagtgaaatgaaacatttggttcatcctgaggccgggcgcggtggctcacgcctgtaatcctagcactttgggaggccgaggcaggtggatcacgaggtcaggagatgagaccatcctggctaacatggtgaaaccccgtctctattgaaagtacaaaaaattagccgggcgtggtggtgggcgcctgtagtcccagctactcgggaggctgaggcaggagaatggcgtgaacccaggaggcggagcttgcagtgagccaagattgtgccaccgctgcactccagcctgggcaacggtgcaagactccgtctcaaaaaaaaaaaaaaaagagagaaacatttggttcatcctcaaaggattttcaggtaaaatggcaaagaggtagaggaacgacttagaggatccttctggctccctaacaacctgagttccaagcaggagtgtcttcataggaacagcccatttctcagagtgaaaagctgggggctggaaggttgtctcatacagtgagctagtggcagggatggggcgctccagagcccctagaaatttctgactctgcctctatgagcccttggaagttaagtattagccagggttctctcgagacacagaactgataagatgtgtgtgtgtgtggagagagaggaaggaattgatttattttaaggaattggctcacatgattgtgggggctggcgagtctgaaatctgcagggcaggctgggaagctggggacccaggaaggagctggcagtgctgtctggagtctgaaggcagaatttcttcttcctcagggacctctcttttctcttggagccttcaactgattgaatgaggctcacccatattatggaaagtaatcagcttttatccatttatgcttttgagacagagtctctctgtcacccaggctacagtgtggtggtgtgatcctagctcactgcagcctggaacttctgtactcctgtagtcccgctatttgggaggctgatcctcctgcctcagccccctgaatagctgagactacaggtacgtgctaccacaccagctaattaaaaaaaaaaattttgtagaaacgggctgagcacggtgattcacgactataatcccagcactttgggaggctgaggtgggcggatcacctgaggtccagagtttgagaccggcctggtcaacatggtgaaactccctctctactaaaaatataaaaattagctgggtgttggccgggcatggtggctcatgcctgtaatcccagcactttgggagaccgaggtgggtggatcatgaggtcaggagatctagaccatcctggctaacatggtgaaaccccatctctactaaaaaataaaataaaaattagctgggtgtgatggcaggtgcctatagtcccagctacttgggaggctgaggcaggagaatggcatgaatccgggaggcggagcttgcagtgagctgagattgcaccactgcactccagcctgggcaaagagcaagactccatctcaaaataataataataataataaaaattagctgggtgtggtggcacatgcctgtaatcccagctacttgggaggctgaggcagaagaatcacttgaacccgggaggtggaggttgcagtgagttgaggttgcaccactgcactccagcctgggtgatggagtgagactctgtctcaaaaaaaaaaatttttttttttttgtagaaatggagtcttgctttgtttgcctaggctggtcttgaactcctggcatcaagcaatcctcccgctgtggcctcccaaagggctgagattacaggagtgagccactgcacctggctttatttggcttttgtttttactcaaagtctactgatttcacatgtaggtatttcagatttcttttttttttgaggctgaatttcactctgtcacccaggctggagtgcagtggcgtgacctcggctcactgcaacctctgcctccccaagttcaagcaattctcctacctcagtctttcgagtagctgagattacaggtgcccgtcaccatgcctggctgattttttttttttttttttttttttgagacagagtcttgctctatcacccaggctggagtgcagtagcacaatctcggctcactgcaagctccgcctcccgggttcacgccattctcctgcctcagcctcccaagtagctgggaccacaggcgcccaccaccacgcctggctaattttttgtatttttagtagagacggggtttcaccgtgttagccaggatggtctcaatctcctgaccttgtgatccgcccgccttggcctcccaaagtgctgggattacaggcgtgagccactgcgcccggccatgcctggctgatttttgtagttttagtagagaccgggggttttaccatgttgggcaggctggcctcaaactcctgagctcaagtgatctacccgcctgggcttcccgaagttctgggattacaggcataagccaccatgcctagcctcagatgttaatcacatctgaaaaataccttcacagcagcatctagactagtgtttgacccaaaattgggcaccacaacctagctaggctgacacataaaattaaccatcacaagctaagcgtcttcaccactttaaatctctaggtcagaggcaaggccaaggccaaggccagacctccaagaatctggattcagacctcttgctgccctccctctgggtgagcagagatgagtcatgctggatgaggaatccagctccaatccagctagctttcaacttcaggcaggaaggggagaccaggcgggatagaggaggagggccgtaggatccacaactgtggccaggatgaggccctgcctgtgctcttccacctctccacgcttggccactttccccaagacctttcaaaaatgtgctctgggcagtggggagggcagaagccggcccaggaagggagccacagatgcccttccaggggccttcccagcaggagccaggaggaacaccaaggggctgccagactgccagacccctgcagccaggcagaatagttcccatcttagggccctgcttctcagggcctgattctccccgcaaaggtggaaaatcagcgaggcttccgggctgcagaagagggcatggggtgggggtggcgtcctcagggctgggaggggcctatacctggtttctcagtggtcactgagtttgtctacagcttcgagacaccgggagggaggaggtaggagctgtgggtgggagtggcggtgggtgaggcaagacagccaatgcaatgggtcaggcaaaggccctgagcttcctgcagcatctcaggcctctctctccatccagcgtccctgctctcaccctgagggtctctctcggtggactccctccctcagagcatggcccaggtagagacttagagcattttgctgcatacctgctctcaggtccccaaccagctgcccacactccacctcttgcccattttcttctttttttttcttttttttttttttgagatggagtcttgctttgtcacccaggttggagtgcagtggcgtcatctcggctcactgcaaccttcgcctcccaagtttaagcgattctcctgcctcagcctcccaagtagttgggattaggcacacactaccacgctcagctaatttttgtatttttagtagagatgggatttaactatgttggtcaggctgaacttgaactcctgactacaggtgatctgcctgcctcagcttcccaaagtgctgggattacaggagtgagccgctgtgcctggcctcccattttctaaaagagtctaattccagtccaaagtccctccctgctccgtgtgcccattaccttcagagagccctcttctggtcctggctcatggactggcctctccctaagacatgcgacaccaaagccatttctattcgcctcgccctgctggaccttttctggagagatgggaattcttggaacaggtaacttactgtctttcgtgtctgagtttccatgtcccaaaccaacccctctgagttcctgctggtctgtcttgggccaatagctgtctggaaaccccaccagtgagaatcctgcctaagactgtttttactccgaaacgccacaatgccagaaggctgtggaaaacataagtctgcagctgagaatcataaaaagttcagaggactggcacgtcctaggaaaaactaaatcgactggagtgactaagcctgaagaagtggaagttacttaccggggtgggagcactcagacctcattcccccagaactgctagaggcaaggatatgaacagtctgggaagcttgaggggaatcctggacccctgcaatactgcagggtccggggctcatggaagcccaacaaggaaaccctgatgcctccgctggtgccctcggtgcccctgactgggtgagtccagatccactcaggttgtcttagattctgtctgatcctctttgagagccagagacaaggagtggcctgtgcagggtcatacaggactggtagctggaactttctagaagattcccaattgcttcagctcctcgattcaagagaaagagggcaagtacccgcctgagaggcacagtgttccacagttcattgcctcaggtgatttgagaaggctgtgcccaagaagatgcatgggagaagggctaaagctcattaaaggcctcagctgatactctaaacttctgtgtggtctcaccaaggctgccaagtacagctgtgcagggcatgtactgcacaagggtgtctgagcggggctgaactcaccaagccttgactctggctgtgcccaaccagacaggcaccttcttccacttctcataaaggcactctatgggctagaagccacattccacctcagtgaaggaaaccaaggggataggcatccttgagtgacctgactcagtcactgaatggcctctacacccccaagtccttggttttcctgggctgccagcagcagagctgtagcgaaaatctaacatggaggcagcgagctcatgaagcttgcccctcgctgggaacacctcttcaggtcatggtcctgctctctgcttcctccaacactaggtcatcattgtcatgaccaccaccatctcaacatcttactttaagaaataaactgttgaaaaagtgtcatttggagcaggggtcccaaacccccaagccacagaccagtaccagtctgtgacctgttaggaagcaggctgcacagcaggacgtgaacagtgggccagtgttcccacctgagctccgcctcctgtcagatcagtggcagcattaggctctcataggagcacaaaccctattgtaacctgcacacgtgagggatctaggttgcacacttatgagaatctaatgcctgatgatttctccctgtctcctgtcaccccagatgggaccgtctagttgcaggaaaagaagctcagcgccctcactgattccacattatggggagttgtataattatttcattatattacaatgcggtaataacagaaataaagtacacaataagtgtaatgtgtttaaatcatctcaaaaccatcccccaccccgggccatggaaaaactgtcttccaggaaactggtccctggtgccaaaaagattggagaccgctgcccgggcacggtggctcatgcctgtaatcctagcactttgggaggccgaggtgggcggaatgcctgagctcaggagttcgagaccagcctgagcaacacggtgaaaccccatatctactaaaatacaaaaattagccgggcatggtggcatgcgcctgtaatcccagctactcgggaggctgagacaggagaatcacttgaacccaggaggtggaggttgcagtgagctgagattgcaccactgcactctagcctgggcaacaagagcgagacttcgtctcaaaaaaaaaaaaacaaaaaaaaaaaactggagaccactgacagggaatacactcaaggtaactatgctccccattcttcccctctcctgaggctgtccctccccatctccttctcctgctacagggaaggggcagcacaggtcctctgtgccccagagcccctcttctaccctgcctgtgacgagggaagtcaggccacctgtcccaacctgaggaagctcagaaaacaccaagtttttcactgggacagacccaggcatcacttccagtacttctccagggaccactgggctgggcagggtcttgggaattggggacctggtcccagtcctgtgtgaccctgcacaggccactccttgtctctgggctgtgtgcgcctctgtcaaacatctcagctctgactgcagcaggtcttctcaccaaaggagccgtggaacccctcctgctgccatttcctccagtgagggagaggggcagaggcagatccaggccccttggccttctaaggacattagagcctcagcgctgcctgtcctctgatggcagcgagccaggaccattgccaggagagagccggtaagaacacaatgtgcaaggcagccaggtagcctattacaaggccacaggactacaccaggtaccagcacctacctggtgccaggtgagatgagagcccctccatgcttccctctctgtggcccctgctctctcctgcccgctcacaggaagtgtgatagtcaactgtaggtgtttatacatgtaaatctccttttgagtctgtttctgtggagaaccctaatacaggaagtaacatccctacgggaagacattaagagccttaagcagcaaattatgaaccaatttcaggagcatctctctgtcatgctgagtccactgtaggcccttccataggaatgcagagcttcaatcttccacacctgggccccggcaggtgcactgcaggaggattcactggctaccccctgcctcccccatgatggcctggcaggagaaggtgtctgtgggtcggcaagatggccctggcattcagcacaggaggggagacatgtctcctccccgagccctgtctgtgcttgtcctcatcctgcatctgagctacaggccctccagacagtggggcaggcagctccaggctgaccatttaccatgaggaaatcagaaacagaggttttgtttccagctgcccagcccaccacagagccctgcctccccaggagcacctgcagctcctgttcccctgattcccccaccatctacaatacagccctttccatagtccgcatacgcagaggactccccaggtccccatggggaaaggggtgttgggggtactgccaggtgcgcggtgtctactgggcggtctaggtccagggcaggaattctgactgttacgcttggtgtggggcaggacctcctgggcccttacctgcccccggtgccaatggagagaaacctgccccactcctgcccctttctattgggtagggcctgaacctggggctccaggaggctgtgactgcatagacagaaactaagggcagtggggtgggatggggggcatcacaggttgccgacttcccaggctgcaagtgctggctccctgtggtgctgggtgtccttcagtggacgagggtgtcctgcaagcctccttggcacctgtatctgtgggtggaggctccatggggacagcggctatggggtgggaatgtgcctggagggggcactgcagggggttccgagatagctgggggctcttcccacaggtccctggcatgctctgggagagacctgggctgagggccgtgggaaggccaagtgggcaggagagggacaggcttgaggaccagggccgctgggaggcaccagcagagcaggtcaggcaagcccacctaggaagtgggggagacggggcttcccacaggtcctgggcctagcgcctgtgtccactcatgagccccactgaggaaaggggtttgcccagcagccagtgtgtgccgtgccctgcacctgtgtaggcccccatggccagagacaagggcagagctggaatctgaccatggccagccctgcagtcacttgccagtcctctatggcatcagcgactgccctgagcccttctagaaattagcatcttggccggccctgctttccctacttgtcccaactggtgccagctccacttaggtgcccagggacgtatgctgagtgaaagaaccaagtactagtgcacagtcaggtgccaggcagggttcttgccctctgaaggcaaaggtcctgaagctcggctggggctggcaggtctgggtctctgtggacaggacagaggctggagtggggacaggctccatccagacgagcatggagagcagcccctcagagaaggaagccagagtgggaagtagagggaggggagagagaccagatgtgcaaggggccagagcagccccacagtaggcagaaaggtggcaagggagccaggcactgagtcatgtggacagcaggtcccagcagagcctgccccagcctcattaccctccccagtgctctgagatgaatggtttgtggcacacagggcagctcgggcctctgtgagggctgggctttgctcatgtgtgaaagtctgcaggttccctggttctggcctctgcccctggcaccatgtgatgtggcctttcaccctccgtcagctaggactgcggtcagcacagacaggttggcctcggcagtatgggggtcggccccagtacctggtggggaggtatctgtcccctctctgtcctgggaccgctgcatcccagctcttgcaccagctgaggccaaggtgggtgaccttagggttcgaatgtgaatctggctcagggcctggaagaaataactgaccacacatgggaatgaatgggtctttccaaaaccacaggcacctggtggaatctcagcagtggtagggaaactcaggggtcatttcgcccaccactccttcattctggaactggggaaactgaggccaaagaagggaaagggctgggcaagttagggtttccactggggccagaactgagggctcctggctcccagtgaagccagcctcccttctgtgccacgctgcgcacctgtactggtggtggcttctggggtccttgccatccctcccggaggaagggaaacagctgctgccatggttttctcctggtgggttgcctgttgcatccccagttcctagactggtgcctggaggaacaggaactcgattgttgaataaatgatttaatgcatactacttttttaattttctgctcatctaattttctcatttttctataattgtatattgcttttataatattttaaaaaccaccatttttactttaagcaacattgtgtcaacttcacaaaaccacctaatgaggccgggtacagtggctcacgcttgtaatcccagcactttgggaggctgaggtgggcggatcatgaagtcaagagatcgagaccatcctggccaacatagtgaaaccccgtctctactaaaaatacaaaaattagccaggcatggtggtgtgcgcatataatcccagctactcaggaggctgaggcaggagaattgcttgaacctgggaggtggaggttgtagtaagccaagatggcgccattgcactccagcctggcgacagagcgagactccgtctcaaaaacaaacaaacaaacaaacaaacaaaaaacaaaaaaaaatccaccccctaagcagcaaaataaacatgagaaaaggctttatggactagaaagccatgtgcagattggggaggtgtccctaatgcctgctctcctgcccaaggcacggctgacactcagacaatcaaatcgagccgggcacccttcttgaccgccaccaaccacttccagttctcatggccccactcccccaccttcccgctggcaaaggatgggaggctgagaggggagctgaccaagatccggcagaggaacaagagtctgcttctcacccagggaagggaaaaacacacagcagggaagacaaaatgaaagaaacagagacacaaagaaaagctgcagggagtgggaggcagagaggcagaaagacacgcggacactgagggccgagcaggagcgaggggcagctctgaaggtggccccaacacactcacatacgagggcactccccactctcagctgtgctcctgtgtctctcctggttaagataaagttagaaacaacaaaatgccacatctctttgagcagcagccgtcggcagagctccatatggctgcagcagccaggagtctgagctaataaaagttaaaaaaaaaaaaaaaaagctgggaaatgctcctggagagccacgtgggcactgctcagggccgggtgggggtagggaggagagcaggcaccataggagggggtccccgcccctgcttggcgcgccaaggtctctgttctcattcagaacacccagcccttctagtaatggtgagtccaagacgcagcaaccaaatgtgctgttttagatgcctgggccctctcctacctccattccagtttctcttaatgggagaggatatgacagtcagtgctgaaagtttgcgtcccctcctctccattctcaaatgtatatgttgaaatcctaacccccaaggtgatggtatcgggaggtggggcctacgggaggtgattcagtcataaggctaaagccctcatgaatgggattggtgcccatataaaagagaccccagagagacccttcattccttccaccatgccagaatgcagcgagagggtaccatcaccagaaagcagcctcaccacacagtgaatctgccagcaccttcatcttggactttccagactccagactgtgagaaataagtatctgctgtttataagccacccagtttatggtattttgttatagcagccggaaaggactaagacagtcggcaagaacagccaggaggagccaggacaagcagtgtgtgtgtgtgtgtgtgtgtgtgtgtgtgtgtgtgttcgtgtgtgtgtgtgtgtgtgtgtatgcgtgggcgcgcatgcgtggttttcttgcagggcaccggcagcactgctcttggtggggaaggggagacagatggctggctgaggatccccacactgcggggagaatctccaatgctgaccccaccccctctgcatcctgatggaggagttggagaagaccctggtcactggataacccttcttcaaggagtctctcccctgcagacagggagtggggatgcagggaggaatcatggcttccaccccacaggttacagcggggtgggggaatacccaggcccacggtcacagtagaaacacttcagaagtctgagccaaaccccgctgtctcctgagagagaacgccagggacagaggctggaggaagtgtgtgcctgatgggaagtttcaatccattctgtaagaatttcctgaaaacagactgtgtgccagtttttatggcctctgccccagaaaagcacgcatggcaatgaaatgacactggggggaggggagggtgcacccaccctgacggtccatggatggaggccagggtactttaggacctctgaagacagcaaagcagtttctggtaatctctgaggaggtggcatttgttccagaaaaaaggaccccccaaccccatcccacagcctcaccagaccctaaagtcagaataaccggcccagctacagcccctgcggtcgtgcttagccactacagaggctgctatttccccagccagtgtccctggcagccttggaaaccaatgaagcaggctctgacacaggaatccctctgcatctttatcactggaaaagcctcgatccagcccaggcagagagcggcggattttaaaaaggaaggtttctctttgtgaaggaaatgaacatgattcagcacaagagccgatcaggaatgtggaggccagactctcccatcaggctccgctcccctcccgccacctcggcagaggccccagactgcacctgccggatgggatcccgtagtgccacagagcctgggcaccatgccactcctctctccaagaacaccaccgcctggcaggctgccaggaacagccaagccctgtggacatcactcccagaaatccaaccacacggaaagcaaacgtgctgtgtctcatgacagtactaacaagcctggtaaatcagcccacagttgcacagccgtagctggggaatccaagtgctttctgaggacacactgacgacagcagcagacacacacgcgtacgcacatcttcacggcacacagactcactaaggtatgccacgagcctacaggttttcaataccatacagtggataacagtggtggtggtgggtctccgccctcaggaagcacttgaccttatctgacaaacaaaaggaacatcagggaaaaactctgcatggattgaatgcctcccagtgtggcaggaactaagagccacatggatctctgagcttcggctgacatgcccaggaaggtggccctggaaaggtaaggtgcattcagtggaaacatgaaaagcattccaggtggaggaagaagagcaggcccagcgtagggcccccctgctcggtgtctggtagccttccaacctgcttgcctaaagaagtgttcttaggtggaggtggaaggaaaaaggtgaccttctgaggtcattatgctcatctttctgcttctaggtagtaacgacctgtccagtctccacatctccagggagtctccaggtgtctgtccattgctcagctccacttgaggggtgagttaaactcttaggtcctggctctgtggcccaggctggagtgcagaggcttgatctcggctcactgcaacctctgcttcccaagctcaagccatcctcctacctcagtctcccaagtagctgggactacaggtgcacactaccacacttggctagtttttgtatttgcatttgtagagacagccatgttgctcaggctggtcttgaactggtgagctcaagtcatctgcctgcctcagcctcctaaagtactgggattacaggtgtgagcatttcgcctggcctcagtggttcttgttggcattagctgatgtggttcctgttcccaggtgcagagtgaagccagcctcaccaccccagacagcagcaggaaccaggattccaggccctagccataccactgggaggcccaaacaagttaacataggaacagccctgcttaagaggtgtgcgccacacttcgagtaaaccaaccccatcagcctcttctcatgggaaagctggggtgctggtgaacacgaagacaggggctacctcagctgggtgtatcccagggaaacagacgcctttttctgctgctccatgacgcaggccgacagctcagtctaaaattttgaggactcagggaaactgctggggtgaagagatgacagctcaccctcaaggtggcctggcacttgccctctctcaatggcggaaggttatttcttctccagggctccttaaagacagcaggcctgagcccaaggggaaggacatctggggaaggggaaagcctggaaggatggcggccaggaaagggcagaggaatggcctctcccatccaaagctggcttgttttatctccacgagcattcgctccagatgcttctaaatgtgcagtgagtttttgatccagactgaaccctggccaggtagatggaatccaaaaaattcttgggccatgcctgagaaaggatgccacaaccctgcccctactggggccagacccaaagtgagtaaggcagattctcctgtttcacagtcaccaagagaatgtgtcttgaatggcagcaccaacaccatttcattcactttgtagcatttgctgtgctcagtaccccagatccctctttgggaaacaaagaaacacaactcagagaggttatctgctgggcccaaggtcacagctgactgaggaccggaaggcgagctgcctacttgatccttggccctggactcttctcagattacacttatcttaaagggaaggggattactttctgttccttcaaggcagctgcctggcatcctgcctgcacccctggccacagctcagggtcatttgtgctgaatgaggcctcctgatacctctccagcaagtgacaagctggagagacgccctccaaatcttagatgctgaagaggggcattcagaagaagtggcaccagcagccacaatccttcagcccaccgtgaactgccacacatgcacccgggtcaggtccctgtttccagatccccagcctggagcaagtcacagcagggagaagggtggtattggactggagcagagattctgagcttggagtctgtagctgggtttcaggggctttgtgaaccctccgaaattgcctgtgagattgcgtgagtcagtgcatttgcctgggaagattgtgtgtagctttttcagagcctcaaaaagatcaaggactcaaagaggctaagaagcacaggaacaaaggctcccgagtccccaccagccatatggctctgggcatacacaaatccagcagccaaacccaagttatcaaatgcaggagaacatgctgtgtgaatggaggtgagggctactgtcctcgctgctgcccctccctggttctgtgcctgctcattgactcccaccccagaggcctgcatgacattcctgcagaacagggtgccccacgctttgcagacccctgtctttactggctgtcttgctgaggaagaggttcttgctggtctgacccctgtgaggcttgtgtgttctcaaggctctcactagctgctcattccctttctgaacatcaccaccaccagactagagaaggaaactggaatggaaaggaaaatgcaattttggagaaagagccacttcagtgcacagcacaaatccagctggacattcctccaaatggcctcagggtcctagaaagccacctctctgtcataggcaagtgaacactcctgtgctccactcccacactgctcaaggcccatgaccactttcgggaggggtcctgctccatccgttccaggccacacagggcagctccaggcccacggcccttgcatccccagccaggggttaagggagcccaacaggagcccagaagcccagagcctgaggacctgctgctttcacagaaaagggggaagtctgataagccccctcccacccccccatcagccctcccagtcctgcagctgaggcgggtaccaggacaccaataagacccatgtgcagatgtctgaggaaatgcttcttgtttcaaggatcccacagtggggctgcaggggcttatctactctccctcaaggcagggagaagctcagtgtccccaggatgtggaatcacactcagccctacagggactggggagcccaaagtatctgcccactttgggtccagtctcctcccgtgggcctccaagcggccctccatcatgcaagcttcgctctggtcttgcaccctccaagaagtgcttgccagctccctctgttcttctgtatcccccaaagcacccattgcagggtgggggaaacagcatgtgatcaggaaaaccttactgtatggtgtgtaaataggataccatggtctggaaaacccaatattctgtttaaaagtgaaagagttactataaaggccatatgtcagcttccaattttcaaaagacaaagaaatacacactgctaaagttcagtggtgcataatgtcatctttctttgatgactgaactcagagaaggcacatggggatccagcagcgtctcgggcatcattctggaagttgttggggaaaacagaggcagaagcagaagtcccacatcttcccaagtcccctcgtctctgcttgcctctccctgtgcagtgcacagcttggggacacatactttagggtaagagcgcaccagatacaaaggtggggaagagtgctgcagaacccaagagggatgtgggtctgattagattttggaagctcctcccaagaaggtgctcctacagcctctttcagcagcgactggaaaaccccagaaaggtcacctgagattttccctctgccatccacggtagactccacctctaatggggtcagtctagcaagaatatggggcctggattgtctacccaccaaagccaggccaagacaacctgcttggtgatgcaggagagcagctttgcactcccctgcctgtcttatactcaacaaaatccatggcatgggccatgctcctctccccaccaaagaaactgacaaaggaaaacaagccacagagaggtgagtgatagcattagcctcagggcagccccaaagcagagggaactggccaattccgcaacatctgtccctagccagtgggacaggcacaggctaaggacagagtcctggcagtctcctgaagttgctgctggccaggtggtcacacagggcaccaaatccagctcccctgtctctaccgctttccgcaggggctcatggttgaggatctgctgaagttagtcaggggagaggaaacagtctcctccttgaactacaatccaggatgcctcccaggcgagtgaaggacctagggactggaatctcattggccccagggctgtgcccctggactcgctctcgggaagccaagccaggtccaactgataaccgcattccttgaggaccctcggccgggagtgactgccagtgggcagacaggaagaaaagagccctggcccagatcaggcaggcatccctgcttccccgcccaccgactgtccccggagaccagcctccttctctgcctgcggaggagagcagtggggacattatgccaacaggtccccttcggcgggcctcacccggccagccttcctccgccctgccctgaggccccacattcagcggaagcgccgaggcacctgctgccagacagggctccatccccgcggaaggggcccctgggcggtgcccctcggtgcccccggcttcctcggttagggatggggcgccccccccggcccagcacgccccctggcccggcgcgccccccgcgccccctccccgcgctcacctggcgcaggtgctgcagcagcgtccccgcctcctcccgccggccctggcgcaccatccgcagcagctcctggaccatgccgactcgccggtggtaggggggcatccccgcgcccgcgcgccccgccttgtccccggcgcgcagcagcagcgacgcccagaagtccggccgttcgcgtcgggggcccggcgcggcgccggggctggctctctccgccaggctgcccttggtctgccgggtgcccatgccgccgccgcccgccgggactctccgctctgggccgcgaggccgcgtccccgccaaccgcccgcccctcggccgcccgtgcgcgctcgcctcccgggctgcaactttgggggaactgttgcgcgcgggcgtcgcgggggcgggcgggcgggcggctgtcggcgctccccgcgctcctccctcttggctacccgggcgcgctccccgggcgctcgccgccggcccgcccgccggccccgccccggcccggctcggcccgccccgccccccgcctccgcgccggagctccgcggcgtcgcgcgcctccctcttctcgggctcccgctccttcccgccccgcggctccgggctggggaccaccaccaggcgccccctgcctgcgtcctctcggcagtcgcgcctcctgcgggcggcagtgctgcgcttcccggggccgtggcgcgggggcgaggggaacaggcaggccccatgggccgtcgctctcggtccccaccgggctccccgacgcttccaccaccgcgcgcccggtgcgtcgggcgagatggggaaagtttggagcatgggggtgtgtgtgttggggggctctcttaggcccagagtcgggtttctcaaggtgggttccgctgagcctcagcgcccaaatcgtcggaggcgctggttaaaaacgcaggctctaaggcctccaccgagacctactgaatgataatctcctcggtggggcctgggatccgcctttttagccagcatgttgggtgattcccatgcacgctcctttgagacctggcctgcttgcagggcgctgtagtggtgtggttggtgcgtaaacctggaaactgtgcgagcttatgggttgtgtgcgtgcccttctatggagagggcctgttgcttccatcatgctctcaaagcatctggaccggagaggtgtgaactcctgtgttctcttgttctcactctcacagccctggagaagggtccctggggtagtcctggtacaacaaagcaaacgcacgtctgcgagtaggcccagcggtacaccctgctggcccaccttcctccccgtgcctctgccaggcccagtctgtaagggaccagagccctgggatctcatggtgttgccagggcttgccagagtgaaggcgaaggcaggtgggggagcttctctgttgcagaccacaggccgccctggtcccagcgcagggcagaagcaattgtgcaagctcgcctctgaccccagctctgggtgttgcttgagggtgtaagggcacgtgggctgtaggggcaggaggctggatcccaaatcacagggagctgagccccactacttagtgagcactgagtatcaggcgagtcttcagcttcttgagtcctgattcttcctgtcaggctaggataataacactgccaagaattgggagagtaaactcggtggacactgctaaaggaaaaaattatttaatgacatgagttaaagcatcgtaaggaagactttattcaggaccattaccataggtgtagggacctctgctatgagattttgcagttgcagggagagagagattgagctcaactccaattacagcatgggcaagtgggaattcgttgctaaggagcagggtgggggtcagcggatagaaacttaataagggaaacatcagggctgagggggattctggctaaacaggttgtatggagcacccttgacataagtaactccatcttagaaaaagggtccattttacatttgaaaaagcctcatgccaacaggaaccagatgttcgcctaatcaataaagactacaccccaccagataaagacataaacaggcacactctttgctatcagtcctcaccagaggattctgtagccataaaaagagcaggacttcagcaactggagatgaccgtctggatagaccccatcttgcccacactctgcccacatcaaagactcttccttgcaagacactgaggactgtttggatcaggccaggagactccccttgtccaagtcactctccttggactatattgttaaccgctccttccctatccccttttctcttgatgttaaatgtactttgatgtggaatgtgtaatctataacatttatatattgattaagtatactaccatgtatggttggcagtattgactgacttgtggagtgacttgagcctgtatgcccacagctcttattaccaagtgaatggggaaaactaaggagaatttgcctccttgagaaccccatgtggcttgtggcttttatgactgaaatagcatcaataaaagcctgacgttgtagaaagacacacatgtgcatgaacctgattatttctgactttgtggcactcacaacaccaacctaacagaattcttgctttagacaggccaggtgaccagagatcacctgggggagggtgggggatgataaacctaatcagatattgaagatgatcagatatacaagatggagggttcttgctaaactgtcttaacagggtctttgctaaaactggattttacatggaagtgcaaagagggtctaggagaaggtttgggagcctgactaaagtttggccaagcaaagaatctttgtcaatatataaacttcaagcagagtagagatgttctgcaaatgagttcctcttcctgctctgtgatcacagggttttccataggtgtcttctccgttatccctgagtaccttgagtatgagtcctggcatctctcctgcaggcattctcttccctttggccaccccactcccaaatgtccatctctgccagcagagaacactcagtcttcctacaagctggctttgcagggcttggacagcactttccaaacttacctgaaccctttgcataggagcacacacctgctggcatctccagagaacccagcttgaaaaatacttatgtgtctctcatctctggtctgcaggaccaccagacaaagtggccaccaaggacacctattgaccaggcccctccctacagacagtgagctctacccacctggagacagaccacacaacctagatagcctgttggcctgcttgagggtgtgtggttggggcaaatgccatttcaatgggagaggggccagaccagcccctcacttgggatctgaatgttagccctctcctctttttcagagacctgattctatcctcctccccttgctcttgatttttttaccctgacttttcctgttttctggcttgttctcctcaagatatgctctactcacctctcttccatctattgaaaaatttcatttgcatctgcctgcttcagtcaccagtgccccaactttatcctttcttttcagctaagatttttagtttccctccctccctccctcccttccctccctccttccttccttcctcccttctttccttttctctctctgtcttcctccctcccttctttttttttgagacagggtctcaccctgtagcccaggctgaagtgcagtggcaccatcacggttcactgcaaacttgatctcctgggctcaagctagcttcccacttcagcctcccaagtagccaggatcacaggtgcacgccaccatgcctagctaatttttgtaatttttttttgtagagacggttttaccatgttgcccaggctggtcttgaactcctggcctcaagcaatcctcaggccttggccccccaaagtgctggaattacaggtatcagtcaccacgcccagcctattgtcattctttctttacctccattcgttcctcacccacttcagcttggcttctggccacaccatgtcactaaaatgcctcttgcctttagcctttagcaacagctaaagaagtgacctagttgctacactcagtggccacattcagtcttcatcttacttgacttttaagcagcatctgatcctgttgcctactcttttgattgaaactctactcccttggcttgcaaggaactactctcctctaggtttctttcttgagttctcctgggagctccttttcttaccctcattctttacttgttgcctttatgcagggtactaccccgtatctcttcctaggcaatgctatttatttattcatttatttgagacagagtctcaaataaacttatttgagacagggtcacccaggctggagtgcagtggtgcaatcatagctcactgcagccttgaactcctgggctcaaggacactcctgtttcagccacccgcgtttctggcactacaggcacattaccaacatgctctgctgggcaatattatttgtaatcatggctttacttgccatgtacacgctgatgactctttccaacttataagctaataaattaacctgtcattgattcatggatgctaaaagaagacatgacactctgtggtcagaaacataggactttgttactcagagcacagcaagaagcatgtgcatcagcatatttgcctccaagtctcacaggggcaatatggggggcccagatggatgttccacaggcagctggttagcgtcatagctgaggaacaccgagcctggagctgcttatgcagggaggagtaagcaagcctgctcttcctcctccagggagatggtacctcatccctcaaggcggctcgctgtaaacacagcactgagaagtggcccaggttaaaaatggtcagggtcttgcaatcttggcatacacagcaagatgtgtgagagtgcaagggacccacggaggatcatctcttccaatagtgagcacttcatgctcgacaaatgagcgcatcctcttccaggcctccctcccaatctacccactcctgtctccgcttttagtaacagcaggccagaaacccgggagtcattgtgcactctttgtttaacctgcatcttgttaaccaaggatagttaatgatgccaaggatgggagctctcatttgctgcgcatttcctgtgtgctcggtcttggggtgtgttctttgcatatattaggcaattcatcctttccacagctgcgaggtaggctttgttattgtcctgatttcccaggtgaggaaatggaagcttagagaggttaaatgacttggccaaggtcacacaggtagtaaagggcagtgttgagattcacgcttaggtctgctagcattgttaaggtcctacattttttttttagacaaggtctcactcccgtcactgaggctggaatgcagtgacgtgatcatggctcactgcagccttgacctcccaggctcaggtgatcttccgacctcagcctccgtaactgctgggactataggcatgcatcaccatgactggctaatttttgtattttttgtatagacggggttccactatgttgcccaggctggtctcgagctcctaagctcacgaggttcaccagcctcagcctcccaaagtgttggaattgtaggcataagccactgtccctggccttgatcctcctttttttttttttgagatggaatcttgctctgtcacccaggctggagtgcagtggtgccatttcggctcactgcaacctccatctcccgagatcaagcgattctcctgcctcagcctccctagtagctgggactacaggcacatgctaccacgcccagctaatttttgtatttttaagtaaagacagggtttcaccatgttggccaggacagtctcgatctcttgacctcgtaatccgcccacctcggctgcccaaagtgctgggcttacaggcgtgagccaccatgccctgccggtcctacgtttaaaatactttcccttcctacagccactgccttggttgaggatctgtcattttcaccctaactttctttctaacttgtctccccacctccagccttgcctcctctgatgcatcttccacaaaacagttggagtgatcattgtagaagagaatctctgtctccctctccccttcagtgatttctgtcactttcagtctaaactgcatacgatggcattgatatcccgaggtgctaccatgtcctcatgtccttgacatcagtcatcattccacattccctaccactctcccaagacaccacattttgtgcctttgtacatgtggcattatcttcctagggtgtccttcacctccttaatagatacctggccatcccttaaggctcgttgtagatatcacctccctcaggaagcctcccccagtgcccccacgtccccttatgtgactataaggctctgtgaataggaaagcacatcctgtactgtgcttctcctgtttgtttgctgcgcttctgctcggggcatccttcttcatcccctcattggttaatccctccttgacctttagactaaactcgtgtttcctcctcagggatggcttctaggattcccttggctctcaccagctaaagtcaggagtccctctcatgtgttctttgagtctcattgtgtgcaccagactctacagtaatggctataagtctctcaaggccagattgttattagtgggagccgttgtccatcagtgccgacacagcacagcaccaggcgcactggaagagccccataaatacttgctgaatgaagcaactccatggccacctccaatggcttagcttcatgccaggaactcagtatagggcaggtgctcaatgaaagggatggaatgaaacagagagctaaaatgcccattggatttgttgacatggaagctactgattgatgatcttcaggaaatcagtttccagggaatgagagagcaaccagaaggcaggtaaagaagttgagagcgtgattgtagcttgttctgtcaagaaactcaattgggaataggacaataaccagaggggtacagggcagagaaggctgttgatgttgctgttgtttttaggtttttaacaagggagatcaccttattcaagagataatcatggaatttatcctctcaagaataattctcttataagcaagtaatttctgtaatatagaaacattggacttttctcaccatcaaatctggaattaaaaaattctcatcgtgactttacttggaacatccacttcagtttctgatcatgttgtaaggatttgaaccataagatgcctaatgaaatttaaagatcattcatattatataaatgtttaaataaaaaaatctaacatatggatcaagctgtaaatatttttattcgacatgtcaagctcttatcactttgattaaaaattttgtatttgggccgggcgcggtggctcacacctgtaatcccagcactttgggaggcccaggcaggctgatcacgaggtcaagagatcgagacctgcatggccaacatggtgaaaccccatgtcttctaaaattacaaaaattagtcgggcgtggtagcgcgcgcctataatcccagctactcaggaggctgaggcaggagaattgcttgaaaccggaaggtggagactgcagtgagcgagattgccccactgcattctagcctgggcaacaagagcgaaattctgtcccctgccccctcaaaaaatttgtatttgggccaggcgtggtggctcaggtctgtaatcccagcactttgggaggccaaggtgggttgatcacgaggtcaggagatcaagaccatcctgtctaacacggtgaaaccccatctctactaaaaatacaaaaattagctggtcatggtagcgcgtgcctgtagtcccggctactcaggaggctgaggcaggagaatcacttgatcccgggaggtggaggttgcagtgagccaaaatggcgccactacactccagcctgggtgacagagtgagagtctgtctcaaaaacaaacaaacaaaaagcacacacaaaaaaacttacacttgtaatatttaacccttttcttaataatcatacaaaagttgttatgatacctctttttacagcagaagaagctggaatatagaaaaagtaaataatttgaccaatgcctccttgatagtcattggagagctggaattcaaaactatgtctgcactatgttagagaatatagattctcagtttatattttttgaaaatttggaccaggcatagtggctcacacctgtaatcccagcactttgggaggccaaggcaggaggatcacttgagcccaggagttcaagaccagcctgggcaacatagcaagatcctgtctctacaaaaaataaaaagacaaatttcctgggtgtggtggcacgcacttgtagtctcacctacttgggaggctaaagctggaggatttcatgagcctgggaattcaaggttgcagtgaactatgatcccaccattgcactccagcctgggtgacagagtgagaccctgtctctaaaaataatgtgtttgaaaacgttgtcacatagttgctgtttgtttttaaacataagaagagaacctgggaagggaggaagcacaggtgaggcctgagtcccctgggcccatgtggggagatgacctggtacagctggagggatgagccactgatgtgcgccaggtagactcgcactgattcagaaaaggaggaggaggccgggcgtggtggttcatgcctttaatcacagcactttgggaggcagaggcaggcagatcacgaggtcaggagatcgagaccatcctggctaagacggtaaaatcccgtctctacttaaaaaaaaaaaaaaaaaaaaaaccacaaaagaaattagccgggcatggtggcgggcgccttttgtcccagctactcgggatgctgaggcaggagaatggagtgaacccgggaggcggagcttgcagtgagccaagatcgcgccactgcactccagcctgggcgacagagtgagactccgtctcaaaaaaaaaaaaagaaagaaagaaaaaaaagaaaaggaggaggagagatgcaaacaagtttgcagatggaagagaaattggaggagttttggccttacagtcttactttctttttttcaatgccatcaaaactacctgctaaaatgcaggggagaaaagcagggcatgggcgtgtggagagagctggtcaagggaccacagctgggaagcttctgcagaggcaggagacaggagctcagagtggcatcctgcggctatgaggtttgctctgactgctcctgacatctcaagaaataggggatgaggttgattccctgctgaggtttcctagggcattcatttgtgatggagggatggggaaagatgggtgatagcaggtcctggacaccatgacctgtgaaatattgtctggaaaggtgatgaagcaagaaggaatccagggacgggtacaatgcaccactggtttaggtggtgctcaaacttgagcatgcatcggaatcccctggagggcttgtaaaggcgcagactgctgagcaccagagtgtctgattcagcagggcagggcatgtgcatttcccaggagtttccagggatgcagatgctgctggtcaggttgaggaccacgctttgaggagagccagaagagctgggatgtggggaggaggtaaatgagagtttttctctcctgaggtctcattaagatttccaagaggacagaaccatttttagactcagaggaatttagggtgtcattgaaagtactgactgtgaggggacaccaaatacatacacacacactcacacacacacagtcactctctctcacacactcacacgcacacacacacacactcacacaacaaagagatccctgtccattagttgacaaaggttctctgcttgaccaaactttagtcaggctcctgagccttttcctaggcccatctgtgcacttccatgtaaaatccagtttagctaagaaccgtgctaagtcagtttagcaagaatcccctcacccttaatatcggatcaggttcctcagcctccaccatcccgcaggtgacacctggtttaccctggcctgtcttcagcaagaatcctgttaggtgcgtttagccagaatcccccttacctctgatgtttcctcttagtaatttcccgtccactgacccccaccctgctccttggctataaactcccacttgcaccagctgtattcagagttgagcccaatctctcaccctactgcaagaccctgttgcagtggtccctacgcctattgcaatggtccctacgcctattgcaatggtcctgaataaagtattccttaccatgatttaccaagtgtcttagtctgttttgtgttggtttaaggaacagctgagactgggtaacttataaagaaaaaaggtttatttggctcatgattctgatgtctggaaaagttcaagactaggcatctggtgagggcctcagggtgcttccactcatggcagatggtgagagggacctggtgtatgcagatcacatggcaagagaggaggtgagagagacagaggagctcttttcaacaaccagttctggcagcgactaatggagcgagaactcattcacccccaaccaccccagggaattgttctattcatgaggcatctgtccccatgacccaaacacctccccttaggccccaccccccaaactggggatacattttggcatgaggtttttgggaacaaacatctaaactatagcactatgtataattggataactttttttttttttttttgagacagagtctcactgtcgcccaggctggagtgcagtggcgcaatctcggctcactgcaagctctgcctcctgggttcacgccattctccggcctcagcctcccgagtagttgggactacaggcgcccgccaccacacctggctaattttttgtatttttttttagtagagacagggtttcaccgtgttagccaggatggtctcgatctcctgaccttgtgatccgcctgcctcggcctcccaaagtgctgggattacaggcttgagccgccgcgcccggccataactttttttttaataagtttattttcttctcaaagaagacacaccccaccccttttctagggtgcccaggttagcccacttctcttttggcagctcttccaaacctggtgacttcttttatttctttttctttctttctttctttttttttttttgagacagagtatccctctgtcacccaggctggagtacagtggcacgatctcagctccctgcaacctccatttcccaggttcaaccgattctcatgccttagcgtcctgattagctgggattacaggcgtttgccaccacacctggctaatttttgtatttttagtagagatggggtttcgccatgctggccatggctggtctcgaactcatgaccttagatgatccacctgcctcggcctctccaagtgctgggattacaggtgtgagccactgcgcttggccccaaccctggtgacttcttttggtgaccaggtaaaatgtttcagagttcctaaataatgacgtatgccagggatgaatgcaaacccctacattttcatccaaaaactagacagtacaagaaaacgcctgtgtgacatcccaaacatccagcccggcttttaatcaggaacctagaagccataggatacctcgcccaggcctttggcagacagcatactgtcagatgttcagaaacactgacgagagaaatgtcctttgcaggagagagagccagtggagggcaggagaactggcatccaggtctccatgaggtataagctctcttcttgcaaacagaacaccagaaggacgcatcttgggacccatccactgagtgccactgagaactgtgggtgagctgccttcgtgcttttcccctctattctctaattatttcttcattgctccatgcatggcttactttaatttggttatttaatctgttacataagaggtgtccatgaactcaccatgcaaaacaaaacagaaccaagccaggtccttgacaagaagtgactgactcatagggttctctgccatcccattgctctgcctccccccatgtcaatatctgcatcctgaatctgatgttcatcattccttccttttctcttcatattattttaaactttcttttttataatggaaaatttcaaaaatacacaaaactagagactagtctattgaaactacatgtacctgtgtccacattttaacttcaaatcataccctgccttgctttatcctacccccaccccacatttcctctgtttccacatttttaagccattgtattttacttatatttgtccctaaagggtgtctatttctattttggttgtctctaacttgataaaaatacatcctgcagtatttttttttttttgaagagactttttttccccatgtactattgtattggtaagaatcatcctcattgctgcctgtcactggagttcattcattctgtgtcctttgtatcttgatttatttctccactcgcctctagatggccattcaagttgaaggtttttgctattgtgaagggcgctgctgtaaatattctttttttttgagacggagtctcgctctgtcacccaggctggagtgcagtggtgcaatcttggctaactgcaaccttcacctcctgggttcaagccattctcctgcctcggcctctggagtagccgggactacaggcacgcgccaccacacctggctaatttttgtatttttagtagagacagggtttcaccatgttggccaggatggtctcgatctcttgacctcgtgctccgcttgccttggcctcccaaagtgctaggattacaggcataagccaccacgcctggcctacaaatattcttacacattctcctcctacacctggtatagtcctaggagtggaattatttaactttaagattaatgctggattattttccaaagtggctacagcaaattacttcccctcccctgtagcactggattcccctcatccatatcctctgctcccctccaatgcttttattgataagcttattaattttttctgattacctggccaactaaaatggaatccaatttgggccttcatttacataaataccataggctgggtttttgcttacttggaacttgtcactccttccttcttttttatttctcctttttgaaatgggagtgtttatcctatgcctgtcccaccaatgtattttgtaagcacataatacagtgcttacttgtctggcttcacaggttcatagctggagaggaatgttttcttgggataaatcataccttgagtctcacccgtatctgatttagataacattcagatcagactttggactttagactttagggttgttgctggaatgagttaagacttttggttatgttgggatggaataaatgtattttgtatgctttaaggtcacgaattttgggggagtcactggggtgaaatgctacggactgaattatgtcccccaaaatttgtatattaaagtcttaatccccagggtgaagatatttggagatgggaactttgggaggtaattagatttagttgaagtcctgagtgtgggattagtgcccttgtaagaagaccatggagagtttgtgccacccaatccaccaaaagggccatgtgagaacacagcatgaagacggctgtgtacaagccaagaacgcaggtcccttgcaggaacccgaattgtttccctgcaacttccagcctccaggactgtgagaaaataaatgactgcagtataagccccacagcctatggtattttgttagggcagccagagctgactaagacagctggtgctgttgaccatctcttcatctgtttaccggcccatctctttccttttcagttaaatgcctgatcacatattttgtctgtttttcgattaggtggttctattaggtaccaagagctgctgtaagcaattaccacaaacttggcagcttaaaacaacacagttctattacctcacagttctggaggtcagaaagctgaagtgggtctcgcaaggctaaagtcaaggtgtgcagactgcccgccttatagaggctctcaggagaattcgtttcctcacctgtcccagcttctaggagttgcccgaattccatggctcatggccccttccagcaatcacatcactctggcctgtttttgtttttatctttctctccctgatcctcctgcccccatcttctaaggacctttgtgattacagtaggcccacgcaggtattctcgtataatgttcccatctcaagatccttaatacaatcatatctgcaatgtccctcttgccatgtagggtaacatattcagaggtttgagggatacggttgtgagtctgcttggggagaggggcattgttctgcctaccacggttgtgctcttgccttttttcatgggtcagtataagagaagcctcctaatagaaaataaaaagtgttagccaggatgtggagaaattagagcccttgtgccctgctggtgggaatgtaaaatggcgtggcagctgtggaaaacaatatggtggtgcctcaaaaaattcaagatggaatttccatgtgatccagcaattccacctctgggtatatacccaaaggagatgaaagcagggactcagtcagatacttgtgaccccatgttcacagcagcattcttcacaatagccaaaaggaggaagcaacccaagtgtctatcaatagatgatggataaacaaatgtggaatatacagacagtggaatgttatccagccttgaaaagaaggaaatcctgacaaatgctacaacatggctaaaccttgaggacgttatgctaaatgaaataagcgagacacaaaagaagagctattgtaagattctacttatatgagatacctagagtagttaatttcatagagacagaaagtagaatggtgggcctagtgcagtggctcatgcctataatctcagcactttgaaaggccaaggcaggaggattgcttgaggctgagagtttgaggccagcctgggcagcatagtgagaacctctctctacaaaaaattaaattaaactgaaaaaaaatgtagaatggtggttgccagaggctaggataagagaatagggagttactgtttaatgggtagagtttttgtttcctaagaaggaggtggagttctgtagatagatggagagtctgggttttctaaaatggggagagttctgtagacagatgatggtgatggttgcataataatgtgaatgtggctgggcgcggtggctcacgcctgtaatcccagcactttgggaggctgaggcaggtggatcacctgaggtcaggagtttgagaccaacatggcgaaacctcgtctctactaaaaacacaaaaattagccaggcatggtgtcacacgcctgtaatcccagctactcgggaggctgaggcagagaattgcttgaacccaggaggtggagtttgcagtgagctgagattgcaccactgcactccagcctgggcaaccgagtgagactctgtctcaaaaaaaaaaaaaaaagtgaatgtacttaacactactgaattgtacactcaaaagtggttgagatagtaaattttatgttatgtgtactttttaccacaattaaaaaaatgaagagtgacatatcagcatttgcatgtgcagtattgttcatttttttgttcaataaactcttttttaaaaacaattatttatttattattattttttaagagatggggtcttgcttttttgcccaggctgcagtgaagtggcatgatcatagcttacggtagtctcaaacttctggactcaagtgattctcctgcctcaacctctcaagtagctaggactacaggcgtgccaccatgcccagcaaatttttcatagagacagagactcactatgttgcccggggtgatctcaaactctggggctgaagcaatcctccaacctcagtctcccaaagtgctgggattacaggtgtgagctaccatgcctggcctcaataaactcttattagtgaataagcattctccagatcctgtgtcaggcactggggctcccaagaagaataagacactgtccctgtcctcagagctcatggtttcagagggacaaggcacacagttgagcaatgtatgcaacagagtgctctagagtattctgggtaataaaagcctacaggtgacttgaggaatataggggagggagtggctggttcttctggcaggctacagtgcgagtcaggaagcctttctggaaaatgtaacatgtgacctgatttctgaagcctgaacaagtagtcaccaagcttcgggggttagggagggagaagtttgagcaatgcaggggcctgacatgtcgtggtgtgttcatggctctgcacttggttctttggggctcgaggtgacagaggaagcctgggccagcagcggatagggtagagaaggaagcagaggccagactacagagagtcagtctctggctgggtgaggtgctggacactccctgtaggccatgggaatggcctataggacagattctgagcaggagggtgacaggatcgccttgaagttagaaccatcactcggcaatgcaagattacttatccgatttattcattcttgcttccagactatgtagaaactggcaaaaagcctaaaagtctagtgttttcaggcctgtttggagagaatgatggacatgggtttgtgaaatatcaaatgcttgttctgacccaaattgctcataatcagaaagagtaccttttcttttttttcttttttttgagatagggtcttactctgttgcccaggctggagtgcagtggcatgatcatagctcactgcagccttgaactcctggattcaagggatcctcccaactcagcctactgagcatctggaactacagtgtatgccaacacacttggctaattttgtattttttagtagagagagagtctcgctattttgcccaggctggtcttgaactcctggccccaaaggatcctcccaccttggcctcccaatgtgttaggattataggcctgagccactgcactcagccagaggagtatgaatacttagatatttgcacacaaatctcagtctgacataagtctgcaactccagcagcaaaaaaaagtctctattctcttttctcagcagtgtttcaaattgagccttattgattatgaccttgtagtttatctctcgcaagtagctttctaataaaaaatacttatgtaactgtctttacttaatgttcaagagtctagcatattctccgtgaatcaggagactaatattttatgctggcagtgacacagaaacccacagttcattgtctgagactacagcttgtcccaaagatccccatggaacacgaagtaatccccatcagctacagccagaaaatcagtttcctatgaagttagaacaatacggctgggtttccaggaggtaaagcatcctgaagctttgctggatggtattatttctggttttcgccaggctgcaaagaattttcacttgttataatagggcagtccatttcctgcaaagaaatatctttcctaggggtctgtctactctatagctcacaatgttcagaaataacaagaactttacaagtgtttacaaacatcgtcttgtgttaggcaagtatcaaaaaatcttgtctctcacagacgtttcagagaatccacacaaataactcagaaagtctgttcattgcagaaaagctagtatgagtttgccttttttttttttttttttgagacaagttcttgctctgtcacccatgctggagtgcagtggcgcaatcatggctcactgcagcctcaaattcctgggctcaagtgattccccttcttcagcctcctgagtagctgagactatagggacatgccaccatacccagctaatttttttttttttgagacagagtctcactctgtcacccaggctggagtgcagtggtgcgatctcagctcactacaacctccgcctcctgggttcaagcaattctcctgcctcagcctccggagcagctgggactacaggcacgtgccatcatgcccagctaatttttgtatttttagtgaaatggggtttcatcatgttggccaggctggtctcgaactcctgacctgaggtggtccactcgcctcggcctcccaaagtgctggcattacaggtgtgagccaccacacccggcgaatacccagctaatttaaaaaaatttttgtacagacagggtctcaccacgttgcccaggctggtctcgaactcctgcactcaagccatcctcctgtcttggcttccctaagtgttgggattacaggtacaagccactgcacctggcctgttctgacttttgtgcggcgtgaagtgaagaaacttaacagggcatttcctttcgtgctgttctggctgtgatgagcatttgcagaatccctgggcattattctcatggcattactctctcactaaagagtctgagggctcgaagtcattatcactcagttctctctgaaacttcaagtcagcatctcagctattctgtcaatgttgtgagcaaaaactagtagccacactttccaagtgacagagaggaagtgtgagcatgccacttcattacatttcctctccggttgacagaagattctgaccattcctcttgttgtctagaacaatggcgggtgattttgtgtccaaaggtcatgtggcaatgtttagagacattttccattgtcatgactggggttgagggagctactggcatcaggtgggtagaggccagggatgttgctaaacatcctacaatgcccggacggcctcctctccgcgaaaagaattttccagtctaaaataccaatggtgtcaagattaagaaatcctggtctagaactagaatccaaatgccccagtgccagccatttagttctctcagaaagcagacttttctgcccaccccaatcatgttccccttttgtagtgatggaagttataacaagatgcaagaccagattacattttccagccttctttgcagtttagtgtggccatttcagtagctcccaccaatggaacaagacctaaagtgatgtgtgccactctggccaaggcttctgagaattcccttttcccttctgctggcaagatgtagatgacaactaggctgtatgggagagccatgatgggagcctggatccctgcatcgccctatggcagagagctgcccatcggctgaaaacacatgctgcagtcgcttatgtgagtgagaaataaactcctgtgtttgagccaatttacatctttaggtctacttgtcacagcagcttagctcaccctagccagtaaacagccaatccccaagagcctattttgatgctaggagccttaggaagcagagagagctctgaatgaggcaaacatggcagggatctttgcccctgaggttagcttgggtcccctctgctaaatggtaggagcagcgcaagttcaagcctgccatcaaggggcccttgctttgtttagtacagccttgacttcaggagtaggttgtgatatgatccccactctgtgtgatttcagctacgtcatcacgattagacacttaggctactccgatggtccattttatctgtcagctcaactgggccactagatgcccagatatctggtcaaacattattctgctgtgtctgtgaaggtgtttctggacgaggtcagaatttgaatctgtagactgagtgaggctgattgttctctctaatgtgggtgagctgcatcccatcagttgaaggcctgggtagaacacaaaggctgagtaataggaaaccccttcctgcctgactgtggggaccaggacattggtctttttctgtctttggtctcaaacagaaacatctgctcttcttgggtcttgagcctgtggctttcagactggaatgtatactcctgggtcttcaacttgctgactgcagatcttgggaagtttcagcctccataattgcacaggccaattccttacaataaatctctctctgtctctgtctctctctttctctacacacacacacacacacacacacacacacacacacacacacacacgcatcctgttggttcttttcctctggagaaccctaatacagttgcaaattgcagaaactcacctgaaagcagtttaggcagaaaagggaagaggctcagagaaccaaagcacaggaagtgatggggtgcagctggccgcagggacagctggaccagcagggcgcattttctccacctcttatccccactgctctgggtgtgttggcttcattctctctttgtgcagttaagcctcttcacacagcagggaaaaagcatcatgatctctaagctcatatcctcacagctgctgggccaaagaggaagcgtcctccctgtctctcacttgaaaattctgggagggacttgggttgagcatccctgctgtgcctggagcaggctgtattatcaggagaaataaggaatgggcataaaaaatggctgtacattgtttcttgcatgtactctgtgacattgggatatggtcactgtccccttccacttctgctggctcatctttgcctcccatccctgctactttgacccagggaatcaaagtgtagcctcagggagcaaattacagaatttttttccaacaacccctcccccaccactcctacattggcagtggtggctgtccaaaacgtgacaggagaaaattctaactgtgcaaaatgtgatagatcctacaacatgatgatacatgagatctgtcatgtaactcaagctggaaaaatttcagcaagataaactgactgccatacatcttaactagtccctgtccagtttctattggctaatgctagtttgtttcttttatttttttgagatggagtcttgctgtgtcacccaggctggagtgcagtggcgcaatctcagctcactgcaactcccgcctcatggattcaaggggtccttctctctcagcctcccaagtagctgggattacagatgcgtgccaccatgtccagctaatttttgtatattcttagtagagacgggatttcactatgttggccaggctggtcttgaactcctgacctcaggtgatccacccgcctcagcctcccaaagtgttgggattacaggcgtgagccaccgtgcctggcccatcctagtttctttctttcttttttttttttttgagatggagtttcactcttgttgcccaggctggagtgcaatggcatgatcttggctcatagcaacctccgcctcccgggttcaagccattctcctgcctcagcttcccaagtagctgggattataggcatgcgccaccacgcctggctaattttgtatttttagtagagaaggggtttctccatgttggtcaggctggtctcaaactctggacctcaggtgatccacacacctcggcctcccaaagtgctgggattacaggcgtgagccactgcgcccggccatttatttcattcatcatacttatcatactctgtgattccttgcttgatttgtttacttgtttactgtccacctttcctaccagaattaagctccctgagggccaggttccatctgtcttggttcttgcagtgcctccgtacctggcacagtggttggcatgcccctgcttgtgatgtgtgtaacagaatatgccttttgccaatgctcagggtgttgctggggttttgctgaggttttccacttttctctgcacatggtgacttaaaggtctgcaggcacttctttgaatctactcttatttccgccatgcctcgcagaagttccttgaggtctctgaggcctgagcggccgttttcttctatgtctagtgtaatcaccctctactttcatactcttttagtcatttcagtgacaacttggaagatggggattcccggtacgagattggaaaggcataaaatgatacggcagtgatcgctctttggagatggtgctcatagtctcaccttccaggggtttttccttcattctacaaatatttatttattggcaggggctcggttcactctcttgagccactctcttgggcaagttccaagtcctcatgttgacctgtctgccgcatttgccattgcgactgctctttcctgtctggggctttctccaccctcttgtttctcaatgcagtaggggtcaagaccctgctccttcctagtttgccttcttcctctttgacatcacctctccatcttcctcagagaatccccccttccttcagtataccacatggcacactggtccactgatttgcccttgtccagcttctcttcccaggcagtctcctccgaggcctttggttcagttcccttctgcaggagctggttctcaattgcgcgtgtggagtcagagcacaatcacatctcaaactcaacacgtgcagggtggaggtcgcttcctccccacacccttgctcctctcgcttctctttccctcagcatttccctgctcctcatccaacttgcagccaactcttgtggattctacattcccagcatctctctgggaccctacctctccatcctggctacccttgccttagtcccagccagaatcatgtttttgttttgttttgttttgttttcccaagacaaagtctttttctgtcacccaggctggagtgcagtggctcgatcttggctcgctgcaacttccgcctcttgggttcaagtggttctcctgccccagcctcccgagtagctgggattacaggcgcgtgccaccacgcctggctaatttttgtatttttagtagagacagggtttcaccatgttggccaggctggtctcgaactcctgacctcgtgatccacccacctcagcctcccaaagtgttgggattacaggcgtgagccacggtgtctgacccatgttttatgtctgttagtgtgacccctatcttcttgcctccagttcttctctccttttagctcctccatgcctcctttaaatgatcttcctataatacagcattgtactatatctgcaatacagcattgtatccgacttcctcctttcatttatttatttatttttttttgagatggagtcctgcttttgttgcccaggctggagtgcaatggcacaatcttggctgactgcaacctctgcctcccgggttcaagtgattctcctccctcagcctcccgaatggctggaattacaggtgcctgccaccacgccgggctaatttttgtatttttagtagagacagggtttcgccatgttgaccaggctggtcttgaactcctgacctcgtgatctgcctgccttggcctcccaaagtgctaggattacaggcgcaagccaccgcgcccagcctgacttcatcctcaatacctcaataccttgaatgctgaattaagtcccaaatccttgtcaccagaggcccttcatggccgggcccctgcccatctctccagcctcccctccatcccttgcaccctacactccaagtctgcagaactgtttggaggtgcccagagtgtactaccctaccctaccacactgtgctgcttccttttcacaaacacctctgtattcgtttgctagagctgtcataacaaaataccacagcccgggtggtttaaacaacagaaagttgtttcttcccaattccagaggctagaagttcaagatcaaggtgttggcagggttggttccttcagaggcctctctccttgcttgtggatggcatcttctccctgcctcttcgcgtggtcatccctttgtgggtgtctctgtgggtgtctgtgccctaatcgcctcataaggacaccaatcctactggactggggtccaccctaatgacctcattttgacttaattacttctttagagacctatctccaaataaggtcctattctgaggttgtgggtattagacttcatgaataattttggggggaccataattcagcccataacgcttctccctctggctaaaaatgaatgtcattctcacatgcaaaatacattcaccccatcccaacagtttccaaatcttaactctttgcagcaccaacttttaagttcaaaatctcatctaaatctcatctaaacccagtatgggtgaggctcccagtatacttcttcctgaggcaaagtttctctccagctgtgaaactgaaaccggacaacaagctatgtacctccaagacctaggggtggggccagcatagaaagaaattggaaaggagaaaggggtcacgtgttagggtacttccatgtatgcatttttgaggttaactcaatggagagtagcctcccttagtgaacctggaagatgccacacgccatttaacgtccacttatcagggtgcccatttggaagcctcttcctcctgtgcttctccgtacgccacccagtatatctctccatctcagtgccataacactcaccacatccatctgatggctgactctcttccctgccagactacacacctcacgacttccagtacatgctctatgagtgactattacgcacataaaccccatgagaggggctttgttgttttgtacatgctgtgtcctcagagtctaaaacaagtctggtagatggcaggtaatcaacaaatatttgttgaatccgtgagtgaatacaaataaacacacacaccaaacgtgtatcatgtgcacattctggattctgattttccaggagtctgtgaatctatgcagtttcttcaaggagagtccaaggggacatcaacacactcctccttcccctcagtggccggataccagctgagcaaccgtcagatgtctccgggtctcccgatgactcactgaatgctttctttgggaggagtgggaggagaggatggctgacaaaaataactgcgggcacttgaagcggcatcaagcctctgtcggcgggggaacaacgggggcgcatctgaaggtttctcccaggcggggcgggcagctctctattcttcagcaccggaggttctcctatgtgtttagagaattagataaacgtagagtgaatggaataaaaccggcattgctcccaagcagtcagctgctcttgccatatgtgaaattctgtatcagctgtgaaggaaacacacaggaagggagcttagtgaacaccgttaaggtgatcattctgtgtgtctgtctttttttgttctttaaaaagggctttatgctttgtattttatctcatctgatgatcacatcaatcaggtcagaagggcactttcacggaagaaaaaggctcagagagaatcactgacttgctggagaggatcattagagcatggttctcaacatgtggtccaaggaccagcagtgtcaccaccacctgtgaacctggtagacacgcaaactctgggccctttccagatcagaaactctggggtggggcccgggagcccattgtacaagacctccaggtgattcaaatgcatagctgagtttgagaacccttggcttagagtcacacaggtaacaagttacagatcctgggtgagaacccaaggatgtccttggatactatacttcagtgagtgacttgcatgttagtagctgacaatatctctcaggacaatcccttgcaatattaatttacattttgcttttgcttctacttcagtttatgaagcccggcacagtccagttccggctacagctccagcttccctcccactcactgtgctggggccacactggccttctctctgttctttagacacagcatgcccttttctgctccaggacctttgcacatactgtttcctctgcccagaatgccatccctgctagcttgattcttctcactttaagtctcgaggcagtcatcctcttttcagagagaactttaggacatgcccatgatgctcacagatcgttctgtttagtcgcatcatagcactcgacacctcccgaagttaacttgtttgtttattttattttatttttggagacagagtttcactctgttgcccaggctggagtgcagtggcacgatctcggctcactgcaacctctgcccaagtagctgagactacaggcacacgccactacacctggctaattttattttattttatttttgtattttagtagagacggggtttcaccgtgttgcccaggctggtctcaaactcctgagctcaggcaatccactcgcctcccaaagtgctaggattacaggcatgagccactgcgcccggccaccttgtttgtttattagaaagtaaattccctgagagcagggtccttctggtcctatccaatattgtgtttcccaagttcaccacagtgcttggcatatagtagacactcaacaaacacttactgaaaaaataaaccatgaactagaggcaacttgaaagagggaaaaagcactttcctccattcttgaatcctgtaagaatggccagtctaggctggctctcctttggggaagggggcaggaagaaaaattaacagtttcttggttatcagggatgcctaatggaagctgcagttgccacagatggcaggggagggaagttaggcttagatgggaagagtgtggctgccttaagacttgcaaggggacagctctctctcggttttgttttttttggagacggagtcttgctctgtcacccaggctggagtacaatggcgcgatctcggctcaccacaacctccacctcccaggttcaagcgattctcctgcctcagcctcctgagtagctggtattacaggcatgcactaccacacccggataattttgtatttttagtagagacggggtttctccatgttggtcaggctggtctcgacctcctgacctcagatgatcggcccgcctcggcctcccaaagtgctaggattacaggcatgagccaccgcgcctggcctcggtcttttttttattgtggtgaaaaacatgtaagatgaaatctaccctcttaacaaatttgtaagtgtagagtacaggcttgttaactttagaactttctcatcttgtgtgaccgaaactccacatgcattgagcatcagctccccatctctcctccccaagccctggtaacaagctttcagctttcagcttctatgaggttttttttttttttttgctttagattccatataaatggaatcatgcagtatttgtccttgtgtgactggcttatttgacaacaaatgtcttcaaggtccattcatgctatagtatgtgtcagaatttttttcctttttaaggctgaatgatattcctttgtatgcatgaaccacactttctttgcccattcatctattaatgcactcttgggttgcttctgccttttgtctactgtgaatgatcttattatgaatgtggatatacaaatgtttcattgagactttgctttctattcttttgggtatatactcagaagtgggaatgctagatcatttgataattctatttttaattttttgaagagtctctgtttatctatttatgagacaagatcttgctctgttgcccaatggcttgatcatagctcaatgtagccttaaattcccaggctcaagcctcctcctacctcagatccccaggtagctgggactacaggtgtgtgccatcacgtctgactaattttttattttttgtaaagatagggtctcactgtgttgtccaagctggtcctgaacttctgggctcaagcaatcctcccgccttagcctcccaaagtgctgggattattggctgagccactgtgcccagcccatactgtttttatagtggctgggccatatcgcagtcttaccaatggtgcacaagggcttcgatttctccacatcctcatcaaccctcgttttatgatttttgttttgtttttcaataatggctatcctaacaggtatgaggtgatttctcattgtggtcttgatttgcatttccctggtgattagtgatgttgagtacattttcatgtgcttgttggccacttgtatatcttcttcggagaaatgtctgttaaaggtctttcctcatttttttttttttttttttttttttgagaggaagtttgactcttgttgcccaggctggagtgcagtggcgcgatctcggctcactgcaagctccgcctcccgggttcaagctattcctctgcctcagtctcctgagtacctgggactataggcacacaccaccacactgggcttattttttttgtatttcagaggagactgtgtttcaccctgctggccaggatggtcttgatcgcctgacttcgtgatctgcccgcctcagcctcccaaagtgctgggattacaggcgtgagccactgcgcccggccaggtctttcctcatttttaggttgggttgtttgtttttgtggctatctattaaattttcgatccaacttttgattctgccatttacagagcactgtatgtcaggtattgtgggaagcccttaacacacacaatctcattttatccttacaacagccttgaaacatagatacaataagaattcacatgttacagatgaggcatcaaagcacagacaggttaaactacatgcccaaggtcacatagctagtaagtgtccgagagggtcatcagaccagaccaatctgatcctagtccggatcataatctagaagccctcactgcatctcaccactgtgcaggttgatagggaggctggggcagggtcctgtagcaaatcacaagggtgtcttctctatagtccagtgtgctgggaagacaacaggttgggaggtaggatcctgggatctgctgatctcagtgctgctccgactggctggggagcttctggcacagtcacctcgtggcgcttggccttagtgagagcattgagtcaagggatgggatgatgttttgaaaaaatagtgtgtcagaaaggaagtactgctaggagtcccaaggctggtgcatacatcatgccggcgtcttccctcatctcagaacccagagcctgtctcctggctgggggctcacagagggtcctggctggtagaagtcttgcttttggtgtgttaaacacccacagagttggagcagagaggatggggagcctggtgctggcctccttgttgggactggcctctgctgtacaggggtcttcaggaggcagagggatggggtggaggggttatatgggtatagagagttgaggcttccaggccccactttgccatactaacccatcagactgcaggcaagttaagctccaggacatctgatcagcaccaattctttcccttccctggttccctctccgctttgccccgtctcactccacatgagtacaaccctaatggcacctcaggagaacacctgtctgccttggaggaggctcagcctgaatctgagcctgtctgctctctgagtccaaactaatgtttaaccaggaagtacatttctgttaggaagactcttcactaaagatgtggacatcgaagttcaggcagggcagagagatttgccagactggactgtcctgccatctagtggtgggataagaggattagctagcgtcccctccagctgtggctgccctggagagaacagcaatttttttggagggtaagagagggaagagtggtttggtaaatgcaccgtcattactttaaggcataatccatggcagtacgctcttagttgcttgagatatctaaccaactgttgggcaaaaagcagcataaattttggcacctgcgagaacactgtaagttttctctaaggggtcacctacaaatgccatcagaggtgggactttggaaatgtcgaagtttggaactcatatactcagaagtcactggttcttgctaacttatattgacacatcacagtagaggtggattctaaagattcactctaggccaggcacagtagttcacacctgtaatcctagcagtctgggaggccaaagtgggaggataacgtgagtccaggagtttgagaccagcctgagcaacatagtgacacctcctctgtactattaaataaaattagcttgatgtggtggcatgcacctgtagtcccagctacttagaagcctgggtgcttgagcccaggagttcaagatttcagtgagcagtgattgtgccactgcactccagctggggtaacagtgagagaccctgtcttaaaaaaaaaaattaattctagagatgtgttttctctgatttgatttattttgggaaacaagtagctctgaaactaaaaaatagttacagtgaagactctagaaattctgaaaatgattactgaaattgtcctactgtttccatttattgggagctgtattcctgaaattgatgcaataacggagatgtagtggagaagggaagctgggagaaggggaaagagaaagagctcaggctcctccagaaatcatcaccttcggcaataataataaaaagagtaagaatgacaactaactatcagtcaggagaggttaggttttgttatgacactatcccagataaacgatgccgaccgacactggtcaagatggtgaacacaggttttattcagcaatactatggcagcaaggaagagagaccagtgtggattgaactcaacttctccaaaacaaaaggctggagacttttaaaggtggggtgtgctcagggaaaggcactaaaggtgtgaatagggttaggccatgtcaggccacctgggtttgttgactgctgtctatctgaaggacacacacacttctcatgtctttgtgacggggcagtggtgcaggttggagcaaggtgcccacagttaggccctcagcctcccctacagactaggagagacagaattatctccctgaagccttgcattttaaagagaagactctcaggtcctggaggaaacagttttgggtggtagttttatatcccaaagagcaaagaaaggctttataattgcaagctttctaaagtgatggctctacagggagttgaggggtggtggtgcagagctctatctgcctatctcttggtattggctggaacaaacagtcaattctcctggcagccttgagctttctcgggaaggcctttattttaattttcaaaaatttttttgagacaaggtctcactctgttacccagcctgaagtgcagtggcatgatcatagctcactgaagcctcgacctcccggattcaagtgatcctcccacctcagtctcccaagcagctgagactaaagttgtgctgtgcatcaccacagccatctgattaattaatttttttttttttttgtagagataggctctccctatgttgcccaggctggtcttgaactcccggtctcaatggctcctcccacctcagcctcacaaagtgttcagattagaggtgtgagccaccatgcccggccatatgcaggcctttagctgggattagggtcatcctagagacagggccttatgcttctagaagccatgctagagttcagttgtctattagtgcagaaattaggatggagccattatatgctgggagttctgcagtttttatttgtttctgggaaaactttaaaaaattgttgaaaacatacatatcataaaatttatcattttaacaatttttaaatatacagttcagtggcattaagtgcattcacattgttgggcaaccaacaccaccctccaccttcagaatattttcatcttctccagctgaaactctacccctcaaataataactccccattcctctctcctgccagcccctggtaaataacattttactttctgtttttataaatttgattcctctatctaccttgtgtaagtggaattatacaatatttgtccttttgcaactggtttattgaactcagcattacgtcctcaagtttcattcttgtagcactttcttcagtaggctaagattccactatatgggctgggctcacgcctgtaatcccagaaccttgggaggctgaggtgggcgaattgcctgtggtcaggagtttgagaccagcctggccaacatggtgaaaccccaactctattaaaaatacaaaaattagccaggtgtggcggtgggcgcctgtagccccagctacttgggagactgaggcagaagaattgcttgaacccgggaggcggaggttgtgatgagccgagattgtgccactgcaaggagatatgacagtttcagatttgaccatgttgggatgattgggcacccaagtggctggttgtagagaaccgatctcaagaatgcagggaacccacacaggaagattagatgataaaaatgaccaacaaggtaatcatcagagggacagtgttataaggaaatacagactaggtagaataacagagaaggaaaaggtaaggaattaggccagaaaacaagctctcatcactctaagctttgattaatgggtcaaaaccctaatgagcatcttgcctttcagttgctttcccgattcttttgtgcattgcacactgctataaaaccattctttctagagtaccaatttcattcccagtcgcagggggtcatgcttgtaatcccagctacttgggaggccaaggcaggaggatcgtttgaggccaggggttagagaccagtgttggtaacttagtgagactctgtgtcttaaaaaaaaaaaaaaaaaaaagtgaaaaaaagatcgccatgtctttagctaaaacttaaagattttttagcataaaagtactatatgttgcataaagaaacagtcatggccgggcacggtggctcacgcctgtaatcccagcattttgggaggccaaggtgagtggatcacctgaggttgggaatttgaaaccatcctggccaacatggtgaaaccccatctctactaaaaaatacaaaaattagccaggcgtggtggcatgcgcctagtcccagctacttgggaggctgaggcaggacactcgcttgaaccctagaggtggggttgcagtgagccgcaattacgccactgcattccagcctgggcgacagagcgagactctgtctcaaaaaaaaagaaaaagaaagaaagaaagagtcatactacttgaatagacatccctccaaggcatacaaatggccaagaaacacatgaaaagatgcccaaagttattagtcattagagaaaatgcaaatcaaaaccacaatgacaaaccacttcacgcccacgaggatggctataataatttttttaaaacagtgcaaaataacaagtgttggcaaggttgttgagaaattggaactctcctgcattgctggtgagaatgtaaaatggtgcagccactgtggaaatcagtttggcatttccccagtaagttaagcatagttatatgtcccagcaattctacttgtaggtatgtacccaagagaattgaaaacaggtatccaaactaattttttttttttgagatagaatctcattctgtccaccaggctggagtacagtggcatgatcactgttcactgcagcctcgacctcctagtcttcttcttctttttttttttgagacagagtttcattcttgttgcccaggctggagtgcaatggcgcgatctcagctcgctacaacctccacctcccgggttcaagcgattctcctgcctcagccccccacgtagcttgggattacaggcatgcaccaccatgcccggctaattttgtatttttagtagagacgaggtttctccatgttggtcaggctggtctccaactcccaacctcaggcgatccgcccactttggcctcccaaagtgctgggattacaggcgcaacctccaagtcttaagctatccttccatctcatttccccaagtacttgggactacaggcaggtggcaccatttctggctaattaattttttttttttttgtagatacaagatcttgctatattgctaggactggtctcaaacttctgggctcaagcaatcctcctgcctcggcctcccagagtactgagattacagacatgagccaccatgccctgcctgaacaaaaatttgaatgtgaattttcatagcaacattattcatgatagccaaaaggtggaaaaaatccaaacgctcatgaacggatgaataggtaagtaaaacatgctgtattcatacaacggaatattattcagcaataaaaaggaatgaagtgctgatacatgtcacaacatggatgaagctaaaaaatgtgctaagagaattaagctggtcacaaaaagccacgtattatatgattccatttatatgagattcccagaatgggtaaatccatagcgacagaaagcagattaatggttgccaaggtctgggggaggggagagtagggagtgactctgtagtgtgtacgaggcttctttatggggtaatgaaaatgctgtgggactaagtagtggcaatgattgctcaatattgtgaatataccaaaaaccacttcatggtataccattaaaatagttaaagtggtgcattttatgctatatgtatgtaaacacacacacacacacacacacacacacacacacacaaagaaacacttataataggtttttttgggcagttgtcacctgatagatgatatcagaagaaattaacatcacagtatcatggaaactgggacattttcctattctggttgattgatttctgagcacagttttgattacaaaacatttcaaacatactgaaacctatagaaaataagacacccacacatctgtcacatagatgtagcagaggttaacattttgtcagatttgtttttggttaaaaaaatcgaacattacaaatacaaatttaatctgacacagatacacacacatataatagatgctaacaacaggattatttgtcatagtaaactaaacagctggggaaaacctaagcatccacgggtaggagacgggagtctgtgttccaagttgttaaataggtttccttaagtgggggtgacaagaagctgtgatggtgaaatcaccgagggacttttatctctgctttttttttttttttgagatggagtcttactctgtcacccaggctagagtgcagtggtgcaatcttggctcactgcaacctccgcctccaggtttcaagcaattctcctgcctcagcctcccaagtagctgggattacaggtgtccgccaccactcctggctaattttttgtatttttagtagagatggggtttctccatgctgtccaggctggtcttgaactcctgaccttaggtaatctgcctgcctcagcttcccaaagtgctgggattacgggcgtgaggcaccgcgcccggcctgtcactgttttgctttaaaaatttcagtgatcatccttgactataaactcccacttgcattggttttctagggctgcagcaacaaagtaccataaactgggagacttaaaacaatagaaattcttctctcactgtttggaagccggaagtctgaaatcaaggcatcagcagggttggttcttctggaggctccgagggagaggcgctccattcttcccttccagcttctggggctgccagcaacccttggtgtgccccaggtttgctccctggtctttgatcactgcttccatccttgcctggccttcttcctgcatgtcttcatagggtgttctcatctctgtgtgtctccgtccaagttcccctcatcttacaaagacactagccattggattagagcccaccctaattcagcaagacctcatcttaactggattacatctcaaagacctgatttccaagtaagatctgattcacaagtacggggatcaggactacaacatcatgtatctttttgggaggacacaattcaacccacaacaatcaggtacaatcaaaaacaataaagatacttccggtgattaaatggtaaaaaaaaaattagaaaataaagagaaaagagaacgtaagcaaagccaattcaaaggaagaaataaaaatggagaggagatgaaatggggagatgtcggtcacagcgtgcaaactgagttacaaaaggaaccagctctggatctcaggtgcagcaagggcagtgaggggtgtgttcattaatttgattctggtaatcatgacacaatgtataccaatcatcatgttgtacaccttgaatatatgcaaccttcatttgacaattaaatattttaaaattaaaaaattaaaaaaacaaggcacattctggacactaaaatcctgctccagtgggtaccattcttcctgaatccagctccttgattatccaggaatgccatgattacaaggtaaattttcctgcaaatttttttttgttaaactgatatgtgccgtttaaagtttctcaaactagtccttccttgctcgaaagtctcttgtacttaaaacactgggaggagagaggctatgggtaatgagaaaggggaggggaaaatatattaaaggtgagacagttctttctacattagatggactatcaggtgacgccatcccataggcaggtgggaaagacgggagtagagcctagaagaggccacaggaccaacaccgggagctgcccgcagagaattgaggactgaagtggccataaacgccaagctctgcaagggagtgaccacagagagaaaagagcagagggtggaccatgaaatcctcaggagaaccttggaaaggggaacagggaagaactgatgtgaagatgccagatggggggtggggacctgagctaggcaggtctccaaagtgagtggaggcagcagtgtcaggggaagggaagtccacaccacatcctacacacgcgatgtcaacaaagtcagagaagaggtgaggagccaaagaccctacaatgtcactgggttcagctgggaagttggtgttgattagaagagagtactttggcggactgagggaattagcgttgacaagtagaaagaactcctataatttgataaagactctgcttgaccaaactttagtcaggctcctgaaacttgtcctgggctcatctgtgcggttacttgtaaatctagttttagcaaagaacccggccaagtccgttcagccagtgccgccagcctctacgctctgatcacctggatatctgatcagattcctcactctccaccatctcccaggtaatgttgggtcaccctggactgtcttcagccagagtcccgttaggtgtgtttagcctgaatactccttacctgtaatgtttccttttagtaattttccacccactgactgccaccctgctccttggttataaactcccacttgcccaggcagtattcagagttgagcccaatctctgtctctcacccactccaagaccccgttgagcggtccctatgcccatccacatggtcctgaataaagtcttccttactgtgctttagcaagtgtcgttgaattattttttccttaacaaattcaatatgaaaaagaagactcaatagaaagatgggcaaagtatataaaacaacacctacaatagacttctttccagtagttacagtgaataaacaggagctataggaatccacatggataaatctgaaaaagacgagataagacaaattgcagaaagaaatgcacaatctggtacttaaagtttttaaattttcattttttacttaacaggtgaaatttcacatattatttgtatatacatgcacatataaaagtgtaaagacatttaaaaagtggttacacgtacagaaaaagacaagggaatgagattcaggcaggagaggttcataggggattttaattgtatctatcatgttttaaaaacattttacatttgattaaggatattagacatcataaaataagccagcctgctatttttggtatctaatgaaaatctctttcttggtcaggcattgtggctcacgcctgtaatcccagcactttgggaggccgaggcgggtggatcacttgaggccaggagtttgagactagcctggccaacatggcaaaaagtgaaaattgtattttttctcttcttggggaccttcagctgtaacagaagagagaagagctgacttctggaattaaccaaatgtgagaggtccaggtttagatgcatctgggaaggtggggggctgcgcagagggacactgtgtttaaatttgtcttgttacatctggctgacagcctggccaaagctacaacattcctgatcacacaggtccattgtgactgcattacggtctcattgcaatttccgcagccctgagggccggctggaattgccaccagggaagttagagaaactagaaggtgctttgttcctggggctggacttttctactggagttaatattcagaaactctggaaatgagactgaatcaaatttccaaatccaaatcaagttaattgtactccctattctcttttacaaattatcagcagcatgcattagagctgtcaaatctttacccacttgatggaaaagaccaacaaagctgctctttttgaacattgctgatttttatttgcttttactttttctagccataacaagagattttctcagaatgccttatacttggtaaaaagatttttacagacttacagatgtgcttttctcttagatgaagtgtgattggataaacagtgaactactcaattttatttcaattctccagcatgaagccattgaaaaatacaaaaattgcattttttaatttttttgagatggaatctcgccctgtcgcccaggctggagtggagtggcacgatctcggctcactgcaagctccgcctcccaggttcacgccattctcctgcctcagcctcccaagtagctgggactacaggcacccaccaccacgcttggctaattttttgtatttttagtagagacgggatttcaggatttcactgtgttaaccaggatggtcttgatctcttgacctcatgatccaccagccttggcctcccaaggtgctgggattacaggcgtgagccaccgcgcccagctgaaaatttcattttaaacattcccttaattttcttacaagtttaaatatctgaaacatgaaaagctgcaaatatctacattcattgtacatcataaatattttattactccttcgagctgccatttctatgatgtacataagaggaatccccggagcacagaaaatgatgagaaagtttaagccaagttcaacatgaaaatgattggcttattttcctttaaacctcatggcacccaagacgcagcttcatgcgcaccttgttattgttgctcacaaacccaccggtcactctgcttcccacttatcttctagagacttttgttcacaaaccccaagccttagcttcatgctccatgaagtcaatgtccacaggatgatagttccacttgccctgctgttctttgaacctcttatctccaccccccgccccccacccacccccacacacacacacacacacacacacacacactggcatccccatgcctcaccagcaccagcacctctacctctggaacattcaccccagacatctcctctcaccaccaccagtacgtcagctacttgctcgagaactcataatattcaaatccttttacccctgggagagctctgtcctgagtgcacatgttcctgttgccagaaaagagggtcccgatccagaccccaagagcaggttcttggatttcacgtaggaaagaattcagagtgaatcacagagcacggtgaaagaagcaagtttattggaaactaccctgttacagagtagggcatcctcagaaagcaggaggaggaatgcatcgtcctttgttagtgcttctacttgtaagaaacttcaaggaagccaggcgcagtggctcacacctgtaatcccagcactttgggagaccaaggcggatcacctgaggtcaggagttcgagaccaggctgggcaacatggtgaaactccatttctactaaaaatacaacaatatagccgggtgtggtggcgtgagcctgtagtcccagctactccggaggctgaggcagttgaatcgcttgaacctgggagatggaagttgcagtgagccgagatcatgccactgcactccagcctgggcaacagagcaagactctgtctcaaaaataaaaagaaactacaaggagctatgactaaacttgggacgtgcctacgtactcactaaaggtaggggctataggcattatcgattttacatgaccattataatccttcaacctaagcctgttcattggcattatctccaagtaaagagcgctgcattccggccgggcgcagtggctcacgcctgtaatcacaacgctttgggaggccgaggtgggcggatcatgaggtcaggagattgaaacatggtgaaaccctgtctctactaaaaatacaaaaaattagctgggcgtggtggcatgaacctgtagtcccagctactggggaggctgaggcaggagaatcgcttgaatccgggaggtggaggttgcagtgagctgagattgcgccactgcactccagcctgggcgacagagcaagactccatctcaaaaaacaaacaagcaaaaagagtgctgcattctgaggacatctggcaagcttgtccaacccatttgattttgttgttgtgttgttctgttttgttttattttgttttaggcttttagcagcctgaagccacggtttttagtttctgtctctagtgataagcggaaaagaatgaggaaggggctttactggcccaaccagaaacagaaactaagaacccatgactgggctgggagaggtggctcacgcctataatcccagtactttgggaggccaaggcgggcagatcatgaggtcaggagattgagaccagcctggccaatatggaaacccatctctaataaaaatacaaaaattagctgtgtgtggtggcgggcacctgtagtctcagttactctggaggctgaggcagaagaattgctcaaacccaggaggtggaggttgcagtgagccgagatcgtgccactgccctctagcctcggcaatagagcaagaccctgtgcaagacccaggctggagtgcagtggtgtgatcatggctcactgcagcctcaaactcctggctcaagggattctcctgcctcagcctttcaagtagctaggactacaagtgtaggcctgcatactcagctaatttttatttttctattttttttttgtagatatggggtcttgctgtgttacccaggctggtcatgaactcctggcctcaagggaccctcccaccttggcctcccaaagtgctgggattacagatgtgagccaccatgcctgccctaatcacattctttaaactgtgtatacttttactgattttttaaatctgtttattttaccagttactgacagaggtatgttatcatattatgattcaggatttacttttcctttcaattctgacagtttctgctttatatattttgagattaagttattgggtacattttaaaggtgcagttatgattatctagtggattaatgcttgtatcatattattcttcatttctagtaatgcttcttgccttaaaatgtattttgcatgatattaatatagcaacattaactttcgattagggtttgtgtggtataccttttctccatgctttcactttctactttttgtgccctgaaatttacaatgcatcttttataaacaaagtaagttttaaaaaattcagtctgacagtctttgatcttctcttatttatccatttatgtttaatataattacaaatgtgtttgggtttaagtctaccttcttgctatttgttttctatttgtcccaccttatctatgtttctttctctctccttattttccaccttttggaaattctccaaatgtttgtcattaaaggactgcttggatacactgtagaacaaccaaacaatatagtaatatgcaactgtaaaaaggaatgagaaatatctctgtgatccttaggatttatttttatgtgggaaaaacaagatggatggatgcgtgaatagtatgctacagtttaagagagaatggaagggatagaaatatatatgtacacatttgtttatgctaaaaagtggaagaataaaccataaaatttaaaagtgattagctacaggagagggagtgaactgggtagagggcataggaatagaagttgggtttctctaatgtactttgttttgtggattctactttgatagcataaaaaacttttcctagttttaaaaccaaaatatattaaagaaaaaacaatccataaaccttgaaagtacaatgaaacaaaggaacttgtgtgtattagtttcttgtggccactgtacaaagcaccacaaacttggtgtcttggaacactttctcagtttgggaggcaagaaatctgcaatcagtttcactgggccaaaatcaaaatgttgtcagggccatgctccctccaaaggctctagggtaaaatccattccttgcctcttccggtttctgattactggcatttcttggttaatgactgcatcactccaatatgtgcctctgtggtcacattatcatcttctcccctgttaaattttcttctgcctgtctcttataaggcatttgtaatttcatacagagctccccaggaaaaacaggataacctccccatctcaagatccctaattatgcacacctaaaatccattctgacattataaagtaacattcacaagttctaaggattaggacctggatatctttgggggccatcatatggtctactacactgtggagttggtgttataacacccagagaaaaattattccaagttactttaagtttcattgacttgactgtacatctctagtagggtatactctaaggacaaaaataatttttaaaaaatcttaaacttttccataataatggtggtggtactattataattgttctgaaatttttaaaaatgtgtgtattgtttgataaagtaaatgagtaattatattggcataactgataatatttgggtttccaacattggagaatagagatacagatataagactgatgaggttaagtaaaaatcctgttgcttgaatttgaattgggagtatcggtttgaactgtagctctatttgggagaggtctagacacatcactattcaacactgatgagtagcccttgcacctagattgtggtttgtaaataccatctcccaccaaaaggaaccagggcctcctgaagaaatcattaaatctaggtatggggaaagaagtgtgccagttgaacctcgtataccttatcatttcagaaaacaaagaagtattgacaactagggtgatgttaaaggcctcaggaatcaacctaaaaaggcttccacaggtcaaagacggaacaatttgagtatcaataggaataataactacaaggatttgaaacacacgtcacatgaatttgttatataacaacacttaagaagcaagcaaataaacaactaaataaacaaaacctcattggtcagtttgagtatcctagggaacaaattattaatttgaaagatgttaaataaaggaataaagcaagcatttattattgccagtgtgtgggtgcgcacccaaggcagcgcgcgacacattccgctgccgatctcccccttggggtgggaagatcttacaaactgcatgtctctcccacttaaattcgtagtcagccttaaataaacccggccgccttcaccacaacaccgccaccgagaccggtagggcctgcctcagcatccgccacgccttctcgtaccccggaagggtgcgtgcgcgctctcggagataggggtcttcagccgtgcgcgtgtggagcagggccacggcgcctgcgcagcggaggctgtggaccacatttcccaagaacactgcgttcctgggcccgcccagtgtcccagagtccctttcgaggcggaagctgggctcctccctgcgtctctttctgggccgtggagctgtccgctctgaaacctgaggaagtcgtagttcagggaggggtagctcttgcacctaggccgttaggaacgagttttaggttcgaatcccatcttatggaaggtggtattggtcccttgggtgtcccacccgtctcagccaaactgcgggccatttcccggggcgagcaaggggagttaccgcgccagtgggtggactcgccgcctctcggagtcgggaggaagtcgagctggggtgcagttacgagtctcagttaataatgaatagggtggccaatggtgggccaggcacagtggctcacgcctgtaatcccagcactttgggaggccgaggcgggcggatcacgaggttaggagataagagaccagcctggctaatatggtgaaacctcgtctttactaaaaataaaaaaattagctgggcatggtggcgggcgcctgtagtcccggctactcgggaggctgtggcaggagaatcgcttgaaccgaggaggcagaggttgcagtgagccgacatcgcgccactgcactccagcatggcgacaaagcgagactacgtctcaaacaaacaaacaaacaaacaaacaaaaaaaacaaaaagaaaaggaaaaaaaagggtggccaatatagtgaaaccccctctctactaaaaatacaaaaattagctgggcgtggtggcgcgcgcctgtagtcccagctactcgggaggctgaggcagaagaatcgcttgaagccgggaggcaaaggttgcagtgacccgagattgcgctactgcactccagcctgggcgacagagcgaggttccgtctcgaaaaaaaaaacaacgaaaaggggactcacttcggagaagctgccctctctgcaaacttatttgagtaagggactgaagactgaagttagggagaggaaagggatacacgtctgttagtgcgagttgcgtgtcttgttagtgcgaactggaacccaagtttcctttgggaagactttggcgaaagagtacaggaacaccagccactccagaaagagaccgctcctcttgaacccgcccacttaactcctcccgcaggctctacgttcgaatgcctccaccctgattttagaaggttataggcgcacaatcaaggaaatgtcgacagagggcgtccttgctctaagcagcattgtccacctgcttcctgagcggggttcagtgattattctctgaacctggacttctggcgttgtgcctctatactccatttccctgcttcaaagctctcctaattgactttattttctgacactcccccactttaccccccaggagtgttgcttcttttatttctttgcctggatggtcgtttggcttagtaaatagacctagaccccaccccatggtgtagaagcagttggtgaacttctataaagggccagacagtacacattttaggctctgcgatctccttatggttgaaagttctactgttgtagcacaaaatcagccttggacagtaagcaaataggtgtggctgtgttccaacaaaacttcactgaaatttgaatttcactgtaattttcacgtgtcacgaaatattttaaccgtttaaaaatgtaaaaataatgtgtgtgtgtgtgcgcgcgcgtgttagcttgggccgccagctagcagtagtttgccaattcttggtagagaaagagagcagtctccacctaggtctgggaattcagggagagaggtgctggccaaaataacagttcatggcctgcttttctagatctgggagtgagtaggactactactagactctcatttgacctctcctttgggaatcgcagggtatatagtgcccactgattggtgggaattttgtcaaggtgggtgtgataatctggcttctttcccttcccagctctttatagtctttctttcttttttatcgttctctccctctctctctttagagatgtggtcttgctatgttgcccgggctgagtgcagtgactattcacaggccggatctagtgcactgcagtcttgaactcctggcttacagtcctgctggttctgagaggcaggggaagaaacggccaccatgctctgcagctaggtctcaggtaggtttgggccatctctcttctctggtttctaggcacatctcaactcaggatgcacctttccagggagaggtgcatcctgagttgaggtaagtattcatcctggttgcaagatgaatacttttcattcttccactacacagtcattttaaagttaagtttcatctatgatgggtattctgggtcctagaagagaggtggtacctgggtcagtccctttccagtctgcagtctaacacatacagattaaatgaatgtgaaaataaaaaaatgctttgtaattacaaagcactctgcaaatacaaatgttgcagtaaagaaaaaaagtatggttgacatctttctttattctagaaagtgcaaatctatcttttttgaatacttagcacttctctgaactactgtatcttgccagcactttgcacagtgcatattagaataacacattcagtcaatatttattgagtgcctacttgcctattatgcatctcttagtgcctttctggtttttatttttatttttatttttttgagactcagtctcactgtgtcaccccaggctggagtgcggtggcgtgatctcggctcactgcaacctcctcctcctgggttcaagtgattctcctgcctcagccttccgagtagctagcactacaggcacgtgtgccaccatgtccggctaattttttgtattttagtagagacggggtttcaccgtgttggccaggatggtctcgatctcctgacctcgtgatccgcccacctcggcctcccaaagtgctgggattacaggcgtgagccacggtgcctggccatgttctgcatttcacccaaccacagattggaaatattgagcagaaaaccctcaaaataatgcaatagaaaatgtaaaactatctacatggtatttacattgtattaggtattataagtaatctagagatgatttaaagtatttgggagaatgtacatcagttatatgcaaatactatgccatttttatatcagctacttgagcatccaaggattttggtatccatgggagtcctagaaccaatcctggaaccaataatgagggatgactctaatgtaaaatatagtgctcagcatgaatattccaggtatagtttaaaatcagtttacagtggagagcattacttttcaatttctggatgcagatcttattttgatatggcccaaaattgttcttcaagaaaaaacctctactcttgtaggcatgaaacagccaactttcttgtaagaccaataggactaaaatgattattggtgaataagagagtggctcctagctcccctgtcaaagttataataaatttagaaagaagaggtttggggatgaaaacaatttagttttaggttaaaccacataaggtacttatgagatagttctgagtgatcactgactatatggctttgaaacttgggatagatctgagtgaaaaattggtaggaggaggtgcatcctgaattgagatgttctcatttaaacatttgaatttaagaaactgtatgggagggggacctcttttggctttggagcctcccaccacccccgtctctgtacaagggaggtgcttatttcttccttctcccttctttctttcctcttcttgcctattaaactatctgccccttaaaaccactccacatatgtccatgttgttttatctaaaccagcatgaggaccaagaaccctggtgttcctccactcatcggagccgtatcattttggtgcattggccaggaaaggaaattcaatcatgagactggtgagtatggagcggatttcaactttatatctgttctttagtctcaaggctctcttccagctaccctgtcgccaaaactttctttctatctgtggtctctctgtgtgtctaatgtgcaggattctgtctgttagaaaagatcgtgaatcacggcatgcagtaactcaataagtgtctctctctctctctacgttttctctggcaagcacatggtatttctaagccacctagtagaaatcaggctgtaggcctcttctaagaatgggaagtttctgcttttaacagttaggagtaggatgtcttccatggccaaattttagtctcaatattgtcccactggcaggaaaacggccattcagttcctatgttcctttaagccatctattctggctcctactaagacagtgcttaattagtaaggggattttaagtccagaagttaaccggaaccattcttctatgggtaaatgctttagcatgggctataatggcaggatatagagttcaatctatcacatcccctcccttaaagggtctcttcccaattacatggtttttcttcaaatccattttttgggaggcacacaggccacccaagtctaggaggtcaaaggtaaataaaaggcagagaactgattgcttgggaacagcgtgactatggcccaaaactcagatcctctggtgccatggcttggagggtcacacctgcagtcatgggtggaacatttaaatgagtgctgggaatccaggaacaaaagagaaaatagttgggggacgcctcctactgctttcttctccatcctggatttcataccaaaaggaaggagactaaaaggacgcttttattctcacttctctttctagatgggtaacagaccatcttcaacatgcacttctcttgagtgtattttgaagcactaggactctttcgaccttgaaactttgaagaaaaagtggcttattttcttttgcagtcatatcaggcaggcccagggaaaacagtaccccaaaatttaaaaagtaactttcagggaagtcatctgagggtcccccttatttggggccccttcaagttcccttctcattgcaggacctttggcaagtaaagggagacttaggctggttttctgatgaccttaataagtatatggaagctttccaatatttaactcaggtatgtaacctctcatgaagggatgttatgttgctgctaaggcaaacccttactgtaggtaaaataagcagctctgcaagcagaagaaaattttggagataagtaatgtctcctatagaaggccaaaagggaaaagaaaaaaatagggaaggcaaaggggaaacaccattcccaataggaaaagaggcaatacctcctgacaaccctaattggaactcctttctgtggtgtttttccttgttttgcagtttaaaatggcttctcttttataatgttcttccaacatggaaaaggttaattttccaaaccttaaaatgtttggcatagagttgagctagggggaaggaaacccagcccagaagcctgatatgctggcaaaagggtaaaaatttcttaccagtcaggcttttggcttctctcttcctgtggaaaccggcaaaagggataataaagatcattgtttatgttttctttaaatttatagttaatgaaaaaggatttgtgaggttggtcttaagctgtaaacaatctgctcttctttgtatgtctttctgtgtggttctgttaaagaaaaggtatcttaggtcaggatgcaggcccagaaacccataagcctgctgttcaaaccagcccagcaaagtatccagtggcaaacttggctacaggcctccatcttgtttcatgtcatgggaacataatctgtaaccatgtggcaatactttgtttttgtctccgccattttacaatggtggctgtcttcttgtgctaaatcagataagccagtttgtcagtctgggctgtgtcagctgatccatcaagggcagggtttacaaaacatcttaagcactgatcataacagccgtttagggagggtcaaaatcttgtagcctccaattgcatggctcttgggccatggtttctaatcctgtagctagtttcttggtctggtccccaggcaaaagggaagtatatcttgagaagcagctgctatcttctttgttttagactataaactgtaaaccaagctcctccccaacttgattcagcctatgcccggggatgggcaaggacagtttggggactggaaacaaaatggagttgtttgggtgagatctcttccactgtctcagtcacaattttgcagtgacagtttcaaaagctgcctgtccgggtggatcacgaggtcaggagttcaagaccagcctagtcaacatgacgaaaccctgtctctactaaaaaaacaaaaattagccaggcgtggtggcatgcacctgtagtcctggctactcaggaagctgaggcagaggaattgcttgaacccaggaggcagaggttgcagtgagccaagatcatgctactgcactccagcctgggtgacagagcaagactctgtctcagcaaaaaaaaaaaaaaaaaaaaaaagctgcctgtcactcctttaaaaataccttttacactcctggttaagtcataacctaattaaagctctttagttttacctgtgaggttacttattgtaaagttcaaaagccaaaaatcttaactgcttggcatggctaaggtcaagtaacaaaggatttagaagaattttcttaaagagtgctcagcttaattaaaagtggaaaatcaagttataggtatattaaaaggcctttatgttttttcttttcttgaatcttgtttttctggaaaaaggctcatctcagccgactgaattatttttctccattttttgtcttactactcttaatgcatgtataaaaggccctaagataacttctggtagcatgggactcctcaggaaacacagaggaggcgccacagaccccgttttgggaaaaaaccctctgttttcctcatgaaaccccaggaattaaaagcaaataattccctctcaaaatcaaaggctctgttctgttttgcattgtgttatctgatggttttgagttttgggggtatcagaaattacttcgcatttttacaagaaagctttggtgtgtaataatcaagtagaaaatacactgtaagggatggctaatagtagttataaatcagggatgctcttggccacctggaagataaggaaacatcctcaccctgcactgggagatgagactcccatcagggatgggctaattacaaaataagccaattggctttgggctgccttgcaatgcaatgcatggtagaagcactacaccgtcctctcccatagtatctatatggtcttttcataaattaagcattaaaataaaagcatagcaaggaggtcttaagacactaatctgccccttagtaaaagggttataaaaggtttgtaaagatttcaccttggccgggtgcggtggctcacacctgtaaccccagcactttgggaggccgaggcgggcagatcacctgaggtcgggagttcgagaccaggctgacaaacatggagaagccccgtttctactaaaaatacaaaattagccaggggtggtggcacatgcctgtaatcccagctacttgggaggctgaggcaggagaatcgcttgaacctgggaggcggaggttgcagtgagctgagatcatgcccttgcactctagcctgtgcaacaagaatgaaactccatctcaaaaaaaaaagaaaaaaaaagatttcacctcatggtcaaattggttaggatttgatggaataatctataaggtttcgtgtaaacaaattggggttaacattaataaactaatgcaagggtaaaattttgctttgaacaagattttcatttcataataaaggctaatgaaaggattttgccttttgagtcatcattttggcaaaataatttatggcaatctggaaattgtccttcctgatacctaactttttgaatggtttagaggggccctgaaacattcagaaaagaggtaaacaggattatttgacatgtttagtcacatgagattgccaaaatgatgtccaatcttatttaagttatagtttggtgaataatactaatatatgtttcagaattgtatgggatttctaagattctaatgtctaagtatatgctatcaatcataattaagggtaaagttattgtaaaccatgaagataaataaacttctttgtcagtcatgtttttaactatcctgaaaattttgtcattcacagacaattgttgtcctgctttgttccttttcaaaaaatggtttataatcaagctctattaaggagttcaacaggtgttctcaaatgcaggtttttaatagctttaaagattgtaacattggaatagagagagaatgtatgggactcacaaagaactaatatgttcataaatatcaagcaaaacaagagttaagtaaatggactgcactcagaaagttaaagcagagtttttaactttgcttggaatattgctgatccttgttttgtttttcagagtcaagaaaagttttaaactatttatggcctttaataattgagtaaggtatactcctgtgaacaaaatttggagcatatttatttgtctctgcctggttcctctagaatttggagactagctgtactcttaacttaacggcaatatagctctttgcatcagtgcaataagaatccatttttctttgtcaacaggacacattggaaaaactggttattttaaccaaggcttgagggtgtgtttccttttaaggaatcaagcttgacatgcagagcaaataaaagccccttggggagaactggcctcataccttgtctgcacagtccctgcacaagattcctaacctgtggtcagtaaagagtgtcactttctaataggtctgggagctccgagtttatcttggggcctcaagaggagaggatcacccaactcacaggtatttgaggatacaaacccatggctgggcttggctttaaaaggtcttatctgagattccttgtagaacagtttcatcgaagccaatccaaaaggcctgtgtagaaataacctttcttgctgcactttatgcaaacaatcaggccatgtataggactaaagtttattctacagacaacacacacgggcctatcataatttgtttttatcaaaaatgaggactggagagaaaaactgtgctccaaagcttatcatacatttctccaaaacttactatacatttctcattaaatcctagtctcatcaattgtttttaagctttttgcctacatattatactaactctgcttattcctgtgaatcaagtggtaatcccctacagtttggaagaaataaaaagggatgggtaatgtaaaaatctgaatcaatatgctagttctgggcaattatcctgcaaattctgccagttaatgaaagtgagtatgatgcccattaactcaggtttttttttttttttgtttgggaaaataaaaccaaggcttcatagaccaccaaaggaaaattctgtatcttggcaagtaaaattttacatggaagttatctactacatcacacttgtggaagttgctatactcactctgctatttgcaagagggttatacgtggtagcaccttctaactgacatattggacagagtttccattgctgttgtattttgctcaattattatccttatagcagggataatagttactgacaaaaaggaagcatgaaagttttactatcactgagtctgctagcactttttattgggtttagtaatgattaacacctctagtagaggaaaatctacaggtacttaagaatgaaatcaaaattattaacaggctcagggaaaatgccggctccagccctggatggctacaatccctctttaatgaattccaatcttctttatggaattggtcagcccctttatcaagccctctcctgcttatatgtcttgtattgatatttggaccctgtatactcagtaccataactcgaactgtttcttctcgcctcaaagcagtcaaactccaaatggtactgcaaactgaaccacatatggacacgccattctcccgaggacccttaagttgaccctaggaggagccctcactgctgttccccatttgacgccccttttcagcaggaagtagccagaaagagtcgtcgcccaaaaccccctaacagcagatagtgtgatatcaccacagggaggaatgtggtaggagttattaagaaattattttaggcagagaggcaaaggggtccttgggaagttttagttttttaaagcatctccagaaaagtttcttgtaaagccccgactcttacagtcaggccatcaacctttgatatgcaaatgcaggccattagaaactgggtccacccaacatgtcaattcccacagccttcttgcccttgccccacatgttcctggcaacatggccacccccacctatccctacgtgtgtagaacatcgtggcgccccatatttgcatatgggtgggagggccagctcttcctctggctatttgaagacatgcctagtcaaaccaatcccctgagccctatgcaaatcaaacactgccttctccagcctctgtatatatacctagctggtatccgtggcaggtggggaccttctctttcggctttggagccccctctcctgtctctgtacaggtgagctgcttctttcttccttctcccttccttctagccccttcttgcctattaaactctctgctccttaaaacaaaaaacaaaacaaacaacaaaaaagaaactctatgggaaagaagacaaaaacagatttaaaaaactttcagtgctctaatctcataaaaatacataattctataaaattgtaggtacatactctttgtactcagaatttccatttaacattattttacaagaagaactcaactaagtgctggagctatgcggttccaatccttattctgtcattatatgacatatggcctcaagcatgacatttcagcatcatgggcttcactttccccattcatacacagtgcagggctcgatgctgtttacacacacgcatttgtacatatcactgtagtgcacatgcttgccatttttaatggttatagtgttctaaggggctaataattatgaaagatagagccatggggagaacagaaacagaggagtaagaatacattttcgggcacatgcaagtgaactgacaccagaagacaaagaatgaaacataacagccttaaagttttagagaccaaataaaggtttagtaagaaaaactagtacttagatttgcatgaaacagatccttaggattaatatttagatcttaccagaaatctgccttaagagatgtgatgggaaaggagggctattagcttataaacaccgtaagttatagacatataatagttaaaacacaacgtattaggtatacatctagttgctttcttaattgccctctacttaacccacttggcagattaactgacaagttctattcccttgtaaatttcctgatggcattgtcacaggccttttgcagctaatttgctgctttctagcatacataacatggaagtgttctctccaatttaggtgcatgcttaacaagatttagttgtttgcacccgaaagtttatcccagttatgtaattatatccctcattacacagatattaggtaactgatggcatgagtgaagagttgtctttatgaaaaccaacttgaatggttggaaagaattgccagtgacactccgggagcagtgagaatccctagtgcccagatcttggtttctaaatagctacctattaaaaggagccagggattcttggaaaaaggtttcattccaggcctggggcattgaaaatgcaaggccaacttgagatatcttgtgttagaaggcaatcaagtgtccaaagactagagagtgaatgtcaaaaggacataagagatacttgaagggctccacctggccaaatttgggacaatctgaacatcagaaacaatgatcataaatgacttaacacattgaatcatgtgttatcactgcagatgaaagcatcaaactctttactggtaattaaactcctacactggtaattaaggtaaaataattgctgactgtgcctctagtgcattcctagttgatgagggaacattatacaagaatgccactcaacaagtgtagagtgatagaattagaaaattgtcattttgcaaacattgatgagacaatggattcaggcaacgatcaccgttggttactttttaccaggtaaaaagttgttggcaatcaaaatatccatgtgctgccagtgtcagtccacagattaattgcaataggaaaaactacctttatattgggaagatctggtgacctcaaatgagtgatccattgataatgagtcaacctgatattaatgagacttttgatatgatgcactatgaaatacatctgtgaggtgttatcattaaaaatgtttaaacaacccaatcaagccttttgccctaacttctaatttatggaaactacagggggtaccggaacaacccacatgtaaataatcagttgaatcctgaacatgagacatttttcaagacaactgacctgctctcttaaagaggaaaaactgtccgggcgcggtggttcacgcctgtaatgccagtactttgggaggctgaggcgggtggatcacgaggtcaggatatcgagacaagcctggctaacacagtgaaaccccatctctactaaaaaaatacaaagaaattagccgggcgtggtggcgggtgtctgtagtcccagctactcgggaggctgaggcaggagaatggcgtgaacctgggaggcggaccttgcagtgagccgagattgcaccactgcactctggcctgggtgacagagtgagactccgtctcaaaaaaaaggaaaaaccaaagtggggactgttctagatagatgaaacagataatcaaatactatgtgtgaaaactgactggatcaacagaggaaatttaaacacagactaagtcttcagatattagggaattactatttgttttttttttaaaggtatgtaaatgtattgtggttatgtaaaagaccatccttatttttgtaagatgcatgctgaagtatttagagatgaaatgtcatgtctgtaagttactttccaatgtttggttaaaaaaaatacggcagaatgttagtttttaaatttaggtgggtatatagttaattttatgatttttaaaactttctatatatttgaaaactcataataaaaagttctggaaaataaggctatttgctaaaaactgttgaataatttgcgggtcagacaactgtaaaagtgggaaaaatacacaaagatctagggttctccactattactagtctgttattttataagggcatcaattgcctctgtttatcagtggaagactttataaatgcattatttacataaaacatacaaaggcaggaaataacagagtaatgcaaaggaaggcgctatggactgtcacatgccacatgctcaaccaagggaaataagtgctgtgtgagggatgaagcagcatcaaaaaaataagattttcaaacaactgttattttaaaaaacagctatataagcacagtttgagtattctgcaacctgtactttgtgcaggatgatactatgaaatcaaggttaactaatgtaagggaaatggaaatcaagttttttaaagaaaacactcaataatatagcctttaggatactagcatcctgggtctttccttcagtacctgtttgtaggatggttttataaacagtaatgtccaaaggaagttgcatggttaatacatgcttaaattgatatttatagcaccagaattgataccaatttcccctcatttagctcaggaaaacttcctgtacaaagatgtcccaggaaacctgattcacgatttttaagcagttcccaagtaaatgttatttgttgaacatttctttgatatatgcacaaaaatatttttcgttataccaattttcactccatgccagtcaattctactttattactgaaatctaatttatataatttattcattaattcaaccatgtattgaccatgcactattatgcaagggactggagaaacaagtaagagcacaatgaaatctcagttctcagaatatggccttatattctggtagtggaatgctgtaaatatgaaatacaatagtatttttatctatttctatttgcatttctgccagttttccttttgagacccacaaacccagttatcattgtttaatgattactgcatcaatgctttttccaattaaattttttcctgacatgttaagagtaatctctgttttacttgtatgtatgaaggagtgtcaggcttccaattattctttaaaaatcggtcattttgtttttagtttcttctaataaccaggctgaattcttttttatttagccactctcatttcataggcaaagcaagtccaattacatttcatgttatagcaattatctatgtatgttttcctcactccactaaaatttcaccttttccccgacccacattctgcagtgaattcagatctattttccatttttttctcacattatttatatagctacactatcacttccacttccttctcttgggatataggtagcatttggcaacccattttagcaggttgcttatgctcaacccatgacaaaatatcacatcctcactttctcatcactctagaaatctttctgttgtgtaaaccacctgtgattttcagcactgtaacaagcttgagaggatccaattaggaagtttgggacctgagcatagtagacactcaagaaacgtgtttcagtggaagaaatgaactttccatagtaaaacagtcacagagaaacctaaagtataaatttaggagtcaggtgaaaaaaatgggaactgtatactttatacctacttttttccttcaggatgaccttgaatgtcaaaacctagtgaaatcaaggctaatgtgtattgaaaattcatttaagcttgaggcatttaatttttgcctgtttaactaaatctctacacatctaatgttatatacacattagtttctatcataacatatctttcattaagcttctctttaatatttccatatctgagggaaggtgtaaccagtggtcacatagaaatctttaagatacttccaactgtttttttttcaaacctactggctccatatggcagttatggcataacaggagaaggggaagtaaaacagggaagggagtcctttacatattttaaggcttcaaagctgggaataaaaggcctgaaagcagcttactcttttctgtaattttaagatcactctctagtgtgaaatctctatttgatggacaccttcctaagttacactcataaggcctcattaggatgtacagttgacccttgaacaacacatttgaactgtacagatccatttatactggaattttttttttcaactgaacagagtttgaaagcacattattcagggatgggaaacctgcatagatgtagggcttttcatatacacaggttccaccaggctgaccgtgcaacttgagtatgggtagattttcgtatacatgggtggtcctggaaccaatcccccgagtataccaaaggataagtgtacttgaaatagagagttgatgagttatgtttttgaatacccttcacagggtttctttctgtaatgaattaaaatcatatcaaattaaggttaagaagtcaagtttccttcttaaatttcacattaaatctaaataggttatatccataccactacttctgatacttctgctgagtatctaacatattgcacttcttcagacttcttctgaatgttctgacacatagaatgcacaaaacaaaattgaaacaaagttgtaaaaccgaattgaagtttcccttatccattaattacgatgtttggcacctgtatgaacacgttgatgctgaataaggtttgtactctgggtgaaggttttaccacatatacgacatgcatagggtttctctcctgtgtgaattctctggtgttgaataaggcatgttctctggctaaaatccttatcacattcattacatttatagggtctctctccagtatgagttctctgatgttgattaagtgatgaggaataaatgaaagctttcccacattcattacatttatagggtttttctccagtatgaatcctttgatgctgagtaagatttgcgccttgtctatatgctttcccacatatattgcatttaaagggtttttctccattatgaatcctctgatgttgagtaaggtgcacactctggctgaatgctttcccacacacactgcatttatatggtttctctccagtatgtgttctatgatgttgagtaagatttgcactctggctgaaggctttcccacatatattacatatataggatttctctccagtgtgagtggtttgatgttgaataagggttgaggaatgagcaaaggcttttccacattcattacatttataacacttctctccagaatgaattctctgatgtcgaataaggtaagtactctgactaaacactttccaacattcattgcatttatatggtttcttcccagtatgtattttttgatgctgaagaaggtgtgtactctgactgaaagtcttcccacattcattgcatatataaggtttttctccagtatgaactctctgatgattaatcagtgatgaactatgactgaaggttttaccacattccaagcatttatatggtttctctccagtatgtgtcctttgatggatggtaaggtgtgcacgctgactgaagtctttcccacagtcatcacacttatagggtttctctccagtatgaattctctgatgtatagtaaggtgtgcacgctggctgaaggctttaccacactggtggcattcatatggtttttctccagtgtgcattctctgatgtgcaataagggatgagatatgcctaaactctttcccacattcttcacattcatacgatttctctttggcatgggtactttggtgtttcaggagggatgggtatttcctaaattttttcccacacacattacacttgtaaggcttctctccaggaagtattttcctatgtacaataccatatgagacatgattgaaggttgccctgccttcattatacacagaagttttattatctaattgggtatcaaactgtacaattaggtttgaatgcttttcaaaattatttctatatatatcatatttactaagacattcttctgtaggatcatattcttgtgaaaggactgacttcaaactgaaacctctttcatcagtgtgaattttccagaagccaccttttcctcgcctctctagtctatcatcgtagtcatatgagtcttctaatttgatggtatgggtttcttcctttgtgagtttagacatatcctccactggagtacatgcttgggctttagtttcccattctgaaataaaaaatatattaaaaaatcttcatttatttggagaaaggaaactgccaaaatagaaacaaaagaataaacatagataaaatgcccaaagacaacagctctgaaaacctcatcatcatggtctttaaaacttgggaaaggagacaaagagggcaaaaaaagggagactaagttgttgaaaacagacaggttcttcatattcaacatggacacagagggaataaaacagattaagtcaggtgacagagctaagagaagtcaaaacagtgataacactgtgtgggataacttgggatggcctcatggattaatttatgtaatgtgttcataaagtagacatgctgactctcatcactctctcttccaatctgctccacacaatcccacataatattcctaaagcaatttcactgagtgctttctatgctcaaatatctctagtaaatctcccatggcctaaaacaatggttctcaaggcagtcctcccaatagcagcataagcatcactatcatctagaaatgtgttaacattattgggtctcacctggacatactgaatcagaaactctggcagtagagctgagtaatctgttttattaaacccagcagttttgctacataccaaagtttaaggactagtggcttaaagtataaaagttaaaaagtttaaaatacctccacttggcactcagtcccaaaataattcagccctttctattctattgtctcctactacaactcatgttcagcttaatttagttatccactacttttttttttttttttttgagacagactctgtgccatcttggctcactgcaacctctgcctcccaggttcaagtgattcttgtgcctcagactcccgagtaactgggattacaggcaggaaccaccatgcccagctaatatttctatttttaatagagacatggtttcaccatgttggccaggctggcctcaaactcctggcctcaggtgatccgcctgcctcagcctctcaaagtgttagggttacagatatgagccgccacacctggcctaaagttatccactacttcttcataatcttctctagatgccatgctaatcctagactctaggccttcttttacgatgccttctccacctattaaaaaagatgtttatagtccagctcatatttctctctacaatgcttctttgaatttaaaatacagattagaggccaagctctgtggcttactcctgtaatcccagcactttgggaggccaaggtgggtggatcacttcaggtcaggagtttgagagcagcctggccatcatggcaaaacgctgtctctactaaaaatataaaaatttagacagatgtggtggtgtgcacctgtagtcccagctacctgggaggctgaggcatgagaattgcttgaacccagtaggcggaggttgcagtgagccatgatcgccccactgcactctagcctggatgacagagcaagatcctgtctccaaaaaaataaaataaaacacagattaggttgaattatgtaggaaattgcctttttttataggtcaaaatggctgaatgtcagcaaccttatatggttcaacccaatatagtattgggctcatgacagaatttggctttatatgagtacagtcatggatttcttaacaatgaggatacgttctgagaaatgtggtgttggtcgacttcatcattgtgtgagcatcatagagtatacttatatgaacctagatgatatatatgtatatatatttttttccttttttaaatatggaaagctaaatgtaccagcactattactgatatcaatcacttcccctacttgatctgcaatacaaatattaagtgcttatgcatcaggcttctatatatgctccattgttgtcttatgggaccactgtcatacatgcagtttgttgttgaccaaaacatcattatgcagcacatgactgtaattcacaattctgtacatttcttatatttccaacctagatgcaaattctggaaatagcttatccttctttcacatttcgtttagaaaatggcccaagactctggatatggtggcgactcaactgaaatggtaaaataaatgacattaacatttaaaaaggagaactcagatgaaagcatacacagatgtgcatgcatacacataaccaaacacacacacacacacacacacacacacacacacacacaccccaaaccaaaccaaaaaggttgaccctcaatctaacctggctgtaataaggcagccaaatatgtatttgttggtgcctattattacgtttctcgtataattacttaacacaaaatttaagttacaacctctttctcctttgaaaccaggtgggaaacatataacttgcaaatatcaagaattacataatgtaatttaatcaaatatggaatttataatatagcaaaaatggtactaaatacttcagaaactttctaagaggcagatcatagtataatacctttacaaatatatccattcaattgagtaatatgcagtaattgaaaatgacagctacatcatcagtaagagactagttattaatagaataagggataacagaatattgataactgataggtaggtctagtttaaggactagtggcaggacacattaagtgaaaaaaaaagcaggtgtataaaaaaatgtagagcaagatcctagctgtgtaaagatatgctatttgtgttacagacagacacagacacacacacacacacacacacacacaaaatctaaggggagaaggtcctggtcatgactgaggggagagggacacttaatatttgcttccttgtactccttgaatttacaaattactttttttacttttattcaaatacaaaatcacagtttacctaagaaaatgtttaggagtaatgttaaatgaaaaaagagtatcataacaagcatgaaaacacatcagaagtggaaaaagattaccaaaatgctaataatgatattataagttttctggtttctaattttcagtaaatttgctatattacttttgttgctatttagtactagtaagtagttatattccactccagtaggtgtagcaaaataaaaagtaataaaaaagaaaaatagaaaatagttatattacttttatgaaagaaaaaaatttataaaccaactttctcaagctaggatttgttattcccctccccagaagaaaatgagaatgtggatggactatacaagtaggtgtgtatatacacaaaaaagagatgagatgataccagaagttgagttcaacttctatgcaatcagtatcagtctatgacagattgtacatacaactgaaaagtactaaagttataattaacaaacttaaagtgacaaggctgaatagtgatcatgaataaattgctactataaaagcactttttttttttttgagatggagtttcgcttttgttgcccaggctggagtgcaatggcgcgatctcggctcaccacaacgtctgcctcccaagttcaagcgattctcttgcctcagcctcccgagtagctgagattacaggcatgtgccaccacgcctggctaattttgtatttttagtagagacagggtttctccatgttggtcaggctggtctcgaactcctgacctcaggtgatcgcccgcctcagcctcccaaagtgctgagattacaggcatgagctactgcacccgaccgataaacgcacattttaaacaaattagtttactaaaacttctgaaacagatcattaagcagggtttaaatatgtgtttatcactaaaaccagaaaggattggttagaagtgttatctgttggttaataaggacaaacagtggtataatatttctaaacagaggagattaatgttgactcaggtaatcaaggaaagcttcagtggaggaagtgtgatttgaattgaacctcaaagaatggcaaagtactgtataaagaacaataaaccataaaatataataaagaactataaaagatctgagacagtaatggccatcaaaccaatactactattctgtttgttaattaccaaagtttccatttcctgaagtgtgactaacctacttcctgaagtaccctaaccaaaggtagattcaacttactatatctctgagctggcaagaaagcaaaatcctcacaggccaaaaattaagtacaagcaggaaggcaagaagtcagtaatagttgaagttgactgcctgagacagctcctcaatcatgtttgatgaccttaaacttccattttgagggtacaagggactctggggctagaagacaaaggctggggcccagccaaggagaggaggctgacaggagtcccttgaacagaggactacacactatgtaagaacaggctaggctagaaaaacaaaaccccaaaacctcacctctaaaagatgaaaaaaggaactgtctttctcagtcttggtgctctttggagggagaaaaatcccccctctccaaatgcataactatacattgccctttcttgagtattcagagcccaaatttgtgctctctgatgatctaaaaaactcctcatgttgagaagttaaagtgacttcagactgcaagtatctcccagaagactatcctggctctaatccaggcttatttccattacactatgtatgttttctcagtgcctagagtgtgcagaatttgttccccagagaatttagtgtgctgtaggtgtattttgtattttgccaactaaggcatataaggccataaattatagagaagaattagcttttaaagtttatgacccttaaaatacctaatgaccaaagttagttttttaaaaaagtgaaacaattcactctaaggtagcatatctttttttttttctttgagacagtcttactctgtcacccagtgggagtgcagtggtgtgatcttggctcactgcagccttgctctcccgggatcaagttatcctctcacttcagcctccctggtagctgggactacagtcatgcatcaccacaaccagttaattaaaaaaaatttttttagtagagacaggtctcactatgttgcccagggtggtctcaaattcctgagttcaagtgatctgcctgcctcagcctctcaaagtgctggggttacaggtgtgagccactgtgcctggccatatcatatttgtcattattgtttaattcattgttgtatactagcatccatattggtggacatacaagaagtcagtgtcttagatttaaaaaatggaatgtctgggtgctatggctcacacctgtagtctcagcactggaggccaaggcaggtggatcacttgagcccagaaattgagaccagtctgggaaacatggcaagaccctgcctctgcaaaaaatacaaaaattatctgggcgtggtggcacacacctgtagtcctacctactcaggaggctgaggaggaaggatcacttgaatgcaggagatggaggttgcagtgagccatgatcacaccattgcactccagcttgggtgacagagtgagactctgtctcaacaacagcaataaaataaaataaaataataaaataaaataaaaaatggaataaaagcaagatgcaagaatatacatagtatacttctttcatatacaaaagaagataatatattaataatttatttttgcaaagagaaacatgggaaggatacatcagaaaccaatgatcatggttacctatagggagtaggtgggaagagagcagaaggaaaggaaatgtatacctttctatatagtttttgagttctcagccatgttactgtttttgcatactcaaaaatgtaaattaaaaataattttaaaaagcaaaaaaacactatccttagtggtatatattctaaggacaaaaaggacttcaaagaaatcttgaactttctagactgtttgttatactaatgtgaatgtgaaactatttttgtgtgtaacatatgatatagcaaataagtaaatatactgatgttgttggaaaccaggttattcactgtataagaaaggagatacaaaatggaatatgggaatataaaaaatggaatatccttgtggtgtcagatttgaattggagtttaagtatgaactcctgacttaaaagaactaacacacacacacacacacacacacacacacacttcctagctctatccactgaacagaagcaatgatacccataaacagtgaatacgcttatggcccagatcttggtttctaagtaccattccctactaaaatgaatcagggttccttagagaaatcccaagtctaaggtgagcataaggtgagcctaaagaacatctggctgtgccagaaagcaaggaaatggttgaagacaaattgggacatgtcaaaaagatgctggacttttgtttgatgctagagtgcccaaatttgggacaattgagcatcaaaaacacaaaataaaatgtaaaaactggaattaatggactgataataaatacatacacatccatatatatatatatatttttcttttttctgagatggagtctttctctgttgcccaggctggagtgcagtggcacaaccttggctcactgcaatctccacctcccgagttcaagcgattcttctgcctcagcctcccaagtagctaggactacaggcacgtgccaccacacccagctaatttttgtattattattatttttagtagagacagggttttaccatgttggacaggctggtctcaaactcccgacctcaagtgatccacctaccttggcctcctaaagtgctgggattacaggagtaagccaccatgcctggccgactaataatatattgaatttttaaaatttccattagtcaacagtggtgtatatatatatatatatatatatggggtgggggagggagagctcttcttttttttttgaggtggagtctagctctgttgcccaggctggagtgcagtggcacaatcttggctcactgcaacccccgcctcccgggttcaagtgattctcctgcctcagcctcccgagtagctgggattacaggcacccaccaccacgcccagctaatttttgtattttcagtagagacagagtttcactgtgttggccaggctggtcttgaactcctgacttcgtgatccgcccaccttggcctcccaaagtgctgggattacaagcgcgagccaccgtacccggctgaaagggctattctttaatgaagaatggtattaatcatttagaaaagatgactgcattagaaaatcaccattttggctgggcgtggtggctcacacctgtaatcccagcactttgggaggccgaggcgggtggatcacaaggtcaggagattgagaccatcttggttaacatggtgaaaccccgtctctactaaaaatacaaaaaattagctgggtgtagtggcgggtgcctgtcgtcccagctacttgggaggctgaggcaggagaatggcgtgaacgtggaaggtggagcttgtagtgagccaaggtccccccactgcactccaacctgagcaacagaccgagactccgtctcaaaaaaaaaagaaagaaaatcaccattttgcagctgggcacggtggctcacgcctgtaatctcagcactttgggaggccaaggcgggtggatcacctgaggtcaggagtttgagaccagcctggccaacatggtgacaccgtctctactaaaaatacaaaaactagccgggtgtggtggcacatgcctctaatcccagctactgtggaagctgaggcaggagaattgcttgaactcaggaggcagaggttgcagtgagaggagatcacgccactgcactccaccctgggcgacaagagtgaaactccatctcaaaaacaacaacaaaaaagaaaatcaccattttgcaaccagcaatataataacgcaaagatcatcaaatggatgctaaaaattttaagtaaaagattatcaaggaatagtcatgtgacctcaaagtatcactccacagatgacttattaatcacaaagaatgcacctttaaaaaggacagatcctgtacacaccaccttaaccaaactgagcatcaccaatgatgagatgaattaccattatgtacctcctgaagaaatgcaatggaagatacacatcacctttcaaatatccttggcaaaatgtttaaactgactaatctttaggaaacaatgaggcaaatctaaactgtaggtcattaaaaaaactggcttggaacctttaaaaaatgtcaatatcatgaaagactttttttaaaaaagaaaaaaggctgggcaacatttctctgttaaaagggactaaagataggagacatgcaagtagaacacgtgattcctgactggattctgtactggggagaaaaatatctataaaggatgtttttaggacagttgggaaaatctgaatatttgactatacatttgatgacactattatataaatgttaattatctagagtgagagaatggtatcatgcttatgtagaagaatgttcacgttcttaggaggtatttaggggttgtcttgatgtctataactaactgtaaaacggctcagtgcaaaaacctttgtatagagatatagcagaagtggctaaatgatgataattagtgattcccagtagacagtacataagtgatgaatgtaatgtgcctgtgtaggtttaaaatcttttaaaatcaagttattgtggaggaataagcaaggaatgagaatgaaaaagtccatgaataaggaacaagttcaataataaaaatatgatgcagatataaaaaaagaaatgaggaagctctttacatactcatttggaaggcttttcaagatatacttttaagttaaaaaagcaaggtacaaaacagtatgtattgtatgctaccattcacattaaaaatggacaaaaactatttttatattgactttatatgcaaaaaacccaaagcaaaataaacatctcaaataactgtttattgccacgcttttatcctggagacaacagttgttcaaactttattacctgacttctacttatgtggaactttattacagacttctacaggaaaacagtggttcattgacatgctgttatgacagcggtcacatgctggggagatgtaggaactgggtgaatgtggtattcaggtggacatttatatatatttatatattttttttgctttatatacttttaaacattttgaatcttgtgaatatattatctttttaaataattagaaaataaaaaagaaagggatgatttagaaaagtgaaggcagggggatgtagggatttgtcagtgaacagaataaaagaaactcaaaaagaagaaggtttaacatttaaatttttagggggcattcatacatgtttaaatctagaggaaggggaaagtggcacaatgaaagccctagacaaagctcttaagagatgggacctagaggtcatgtagaaggataaaatgagaagagacacgggaaaagtgtgttaacagtgatgttaggaagctcttcctgaagaggcctctgtaaggaagcaatgccaaacagctcagtgttcttcacaggctagaatgcctttgcaaaaagtgacctggtcatatttaaaatgcatttctcaccacatttaggatatagattcttaaatacaaagaagctcatgcgctttttgtttctcacctggactagggccttctaaaatttcttttatcaccatccatggttcttccaatatgggaatcacagttggtctgtacactgtaagtcctgttcaggaggaatataaagaattttatcctggagataaatggttgctcaaagttttattaccagacttctacctatctgggagaacagacctctgtaggaaaacaatagttcatggacatgatctaataagagaattaggctgttgattgttatcctttcagagacaggataacaatttcctgccactgaagaggatatgtgaaggaagaaacattcccttagagtagcaaaggctgggcaaggcagcatcaggtggcagcactatgaagctgtgcatcagttgccaatgttctctcacttaagaacctttcatttggaaaacgggagtaaaacagtcactttcgtgcttgaatgagataagaacatttatttctggaccccatttttagccaagcatgtctgaggaccaacccatttttaatgggaacaggctcggaggaggagggatgcagatgatccttacccagagaaaccatgttccaatagttctgtaacgtcacagtcttgtataattccttctgcacaggacgcattaactcccagtcctcctgggtgatgtctacagccacatctttgaatgtcatcgattcctaaaatatcaaatgtaacttaactcagttcaagaactaatggcaaaggggacactgataacactgggtatatgtatggtgggggactgtcacagaattttaagctttagtaggatcctagaagttgtctagtcaaaaccctcccctgacatatggacagccctacagcatctctccatgaccctaaacggaagtttgaaaatagatcagaatttattttcacttagcactcatgcatgcattggtggcagctccattttaaacagaaaaggtttatcattactatttttaaaagagacagagtctcgctctgttgcctgtgctggactagtgcatgcattgctggcagctccatttttaaaaggaaaaggtttattatcattatttttaaaagagacagggtcttgcctggtcacctggactggagtgcgatggtacaatcattgttcactgcagcctcaaactcctgggcagaagtgatcctctcacctcaccctcctgagtagctaggactacaggcacacaccaccacatctggctaatttttaatttttttttgtagagatggggttttgctatgccacccaggctggtctcaaactcctgaactcaagcgatccttcacctcagctccccaaagtgttgggattacaggagtgatccaccaggcctgacttgagttttaaattttaaacacagatgacacagttgaatggttttgcttttcaagctgtgctttaagaataaatccaacatgttataattaaaatgttaagatatttttatgtgttctatggttaaattcagtctttctttttaaaaatataacagataccaataatcacagtgttgaactgctgcactgttaaatacatttcacaatctggtaaggttagtgcttttcttgtttgctccttttgttaaaaatatagtattatcttacatgtttcttttttctctttttttatttgagaaagagtcttgctctgtcgcccaggctggagtgcagtggcctcctgagtagctgggattacaggtgcacgccaccatgcccagctaatttttgtatttttagtagagacagggttttgccatgttggccaggctggtctccaaactcctgacctcaggtgatgcagctgccttggcctcccaaagtgataggatgacaggtgtgagccactgcgcctggccacgtgtttattttttcatataattgtcagtatctttaaaaaagtcatattggaggccaggcgcagtggctcatacctgtaatcccagcactttgggaagccaaggcaggaggatcactttgaggccagaagtttaagaccagcctgggcacatagtgagatcccatctcttaaaaaatcttttcttttaaatcatactgggatttaaaaattgtattaagtttataacttagggagaactgatgactttataatattcaaggtttctttcatgttctacaaaatattagacatgaaagtactgcaatatttatattatgcttagttttagatattttaaatttttttcgggggtgtgatactggaggcatttttttcattttatcatttatctcatttttatatgtatatatgtagatatatatataagtatatatatgtaagtgattgatttttgcatgtcattttctgtagtcattttatccaatttttctattagtgtttctaacactttttcccttgattttgttaggctttccaggtaaatgttcacactatcaatgaataatcattttaacttggttaccaaaagctttccaatttcagaaaaaccagttatatttttacagtaaatctttctcttaaggtatcttgagttactattctttaaaataatatagactcatggccgggcgcggtggctcacacatgtaatcccagcactttgggaggccaacacgggtggatcacctgaggtcaggagttcaagaccagcatgagcaacatggcgaaaccctgtctctactaaaaatacaaaaattagccaggcatggtggcatgcacctgtaaccccagctactccagaggctgtggcatgagaatcacttgaacccaggaggtggaggctgccgtggaccaagatcgcaccactgcactccagcctgggcaacagagtgcgactctgtctcaaaaaatatatataaattcatgaccaacagtaatatgacagaatgcatggcctttaactacttgttaatgaggaaaaataatagtaacaatcatctattaattgcttaactgtaatccaggctaactacaagtctcataatatttaatactcacaacctaagaggtaaattctatttatgagagtagaataactcaggctaagagaggttaagtatcttgtcccaaattgcagttccaatggtagagccgggaaacaaaacctaaatccatctggctgtggaggtcaatctcgtattctctatgtgatattgctgacaaagtcaaagtaaggaaagacatatcaagggaaggcaatggaagcaccttttctttatagtacattcacctaccttaacagaccaagataacataggagagaaactggggcttaagtccttgatagagcttctgggggcacagtagttatagggccaggtcagaaaatgtcctcacacactaagaaggcattttaaaatcagaaaagacagtcacactcactttggtcaccaagtcatttagccatcctgtctggaaagcatgttttcctctggggtcttcctctggggtatcttgggaaagggtagagttttgaggagctagagaagagaaagaggtcatgagggagattagtcctttctgaatagcctaggaaacccctcaccaaatagatgcctacactttcttaaatcgagaagtaagaaggaaatcaaaaacagcactcctacttcaaagcatcagaggaaagggccaatgacttgtcctaagacatcaaaacagacttcaaaaacaagctcgctctaaaaatcttaaagagtatgaacaaaattcacattttaactaaatccttatgtgatattaattttgtgagttatctcttaataagggaatgttctctagaccctttcttccttttttggaagtattttattgtaaaattcaattcacaaagcaaatgatttattagtagaatggtgcaaacctctgaaggtactttctgagggctcacacagtggtaatttggttgcgtctggtcattatttcaagacgtttttcttgggggtttagataatgtgtgtttgctcccaagcaatctggaaggagaacaccatgcaggatggagctcatgttaaagccttgttctcactcactaacctttgttctccccagtttctttctttttaaaaaatgcatcctggacctctcagtgctctccctgatttctttaaaggagctgctcagatgtgctagttgtcttctttaaccacccagggattcctcccctctctgctctatgattctcaccttcctcttctagaatctgagtcaaatcctccaccagagtcactgcttcctcgctgctctctggatactgggactttacccaagtcctaacctcaccaggcaggatggtcaggaattgctccagcaccagcagctccaaaatttgttcctttgagtgaatctcaggtctcagccacttaaggcagagctctcggagttgactcaatgcctttcgaggaccagccaggtctgggtatggaaaattcctaaaattctgtcgacaggtctcagtgtcacgcaagaatcttgaagtaaggatttccttctcaacattgtagggtccactctgagccttgtctgacttccaccttagaaggatttgagaacgtgaagaactgttcatcctcttgcttgaggctaacattgctacagacaggagagtcaatctggcaatatcctttatttctccagtagtgagccaactgcttgaagtctcatgctagagtcacaaggacactatatcaaaggctgctgcagccgagggcagaacagaatcaaggtagagttagcagccttagtgacaaattctgagcccagaacttgcagggatggataagagaccctgaaacacaagcatggaccacaaggtcaagaatccctggtgtactctactatacatatacacacacagaaacagactcgcagtgtgcatagatgaacacacataagctttaccttgtcttcctcccctatatccttagacttgtaagggaactgccatctgcttggggttggtgggggatggagctgctattaaaaaggtagtgtcagaggcaatgactcgaatctaagccaaacaacagattaaacctctaacctgttgtaacaaaaattaaacatttttatagagaaaatagtttcattattttagtcactgatgttacagaagctgtaatgactgaacggactctcaacaataacaaagtgaatctgttacttggaagaaactaggagaatttcttcttaatacagtgctcaaggttcccaagggaactgtcaggggaaagggcgagccatttatctgcgttgcatgttaatgccagccgattctagcctttcactatcagagggttgggaagaccagcgggttggactggaaaagagtgaagaggttggtgtgacttcaagtcctttaagtgcttctataggagacagttctttagggatatattcgaaaccaggattctcgaaggaaaccttagaaccggcctgatctggaggagaaccgacaccacctctccccaggctccagctccgagccctgctgaggcacagtcgtgccaccaaagacaactgtttacaaggccctgcggaggtgatgcgacagccttgccttgcctcctgtcgcctccccttcccggccaagtccctctgcctcttactcctcttcagccgcagggtcgaggtcgagggcagcgggggagtcggggaccgtgcgacgcgcaacgctgggactgggcccacagcagcctccaccccgtctttgccctcccgcaagccacgagcacgggagcccgcgcgtggacgggctcgggctgtcactgatcgcgcggacactcgcgcgctgcgcccggacatcaatacctgtcgctgggacccggccgacgggcagccggagcggccctaaggccacaggcaacaatggcgacgctggcacaggcgcctgcgtggcgggctcagtcccgagcggcagcggatcctcgggctccgccacttcccttccccgcaaagcacagagtgtcccggccaggagctgcacgttccagcccggtcctgagaagcccggcccagaaaccccggcgcctctgcttagccgcgacctcgcctcggcgtcactgcgcatgtgcgccagaggaacgctgcgcgcccgcagagccaatcggagcccaagctgccgcctccccctcccgcgcctctggccctggacctgtctccatggcaacctcctccacccatcgctctgacttgcttgtcagcctgcgaggttccgaagggaacttcaaagtttccccgggcagacgcaggtctggtagacgtcttggaggccagggaggtgccagtagctggaggagcgccgggagttgaagccccgcgccaactacgcagagaaaactgggcgccagatttcctagaggaagaatgggcagggaagatgtgggtctaaaggcagaaagacttaatgtgcggtttcgggctttactgtgcatacatactaactgtgaaaggttttcacttcctcctcaggaatttgattctgagactctcagattgggggaaaaaaacccatgttctttctttctttcttttttttcttttgagacggagtctcgctctgtcgcccaggctggagtgcaatggtgcgagctcggctcactgcaacctccgcctcctgggttcaagtgattctcctgtgttcaagtgattctcacttgaacttcctgggttcagcctcccgagtagctgttatttctaagagacacaaaacaaaaatacataaaacactggaaaaataaaagcatagaaaaacatattcaaggtgttcccgttatctactgttctattaacaaaccaccccaaaacttagtggttttgaaggacaatcaccgtattatgctcataaatttcatggtgaggaatttgaaaggggaactgagtgggtgggcctttgcctcattatgtctgtagcctctgttgggatgatttgatggctgggagggcccgcttccaagatggcttttccactcacatgtctactgcttgggaggagatgggctaaaagatgaactcggcttgtgtttgaccagagtgcctcaatgtggtctctccagcataaaggactgagggcagctggacttgttacatggtggctctgggctccaagagtgagcattccagtgaacaagagagaagcgccatggccaattataacatggccttggaagtcacctaacaccaattctgtcagactcttggtcaaagcaatcacaagcctacagagaatcaaatggaggcagaatcctgtgagggtggaggaggactgtcaaagactcttaatatcaccacaccaggaaaattttaacaaaaagaaagttggaccgggcgcggtggctcacgcctgtaattccagcactttgggaggcccaggcaggtagatcacctgaggtcaggagtttgagaccagcctggccaacatggtgaaactccgtctctactaaaagaacaaaaattagcctggtgtggtggcgcacgcctgtaatcccagctactcaagaggctgaggcaggagaatcacttgaacctgggaagcggaggttgcaatgagctgagattttgccactgcactccatgtactccagcctgggcgacacgagcaagactccatctcaaaaaaaaaaaaaaacaaacttggggagtgtgatggtcttttgatgtgtcaacttggctaggctacagtctcttgctatttaagtaaacacgaatctaggtgttgctgtaaaggcattttgtagatgagattgaagcccataaacccagttggactaagtagcatgggagattatcctagataatttgggtgggcctgattcaatcagttaaaagctttcaaaaaagaaccgaagtttccctgatggagaagaaactccatcagcgtaccacagcttccagcctgcccttcctgatggggtgctcttatggactttggactcacctggtcaccccctcaatcgagtaagccaactctttgccacaagtatcttaaatatctactggttccgcttttttgattgaaccctgactgatacaagtaataattctaatatctgataagctagaatttgagaagattaaaagggaataaataagagtgcttgatggaaaagatatatttatcataaatatacagcatgtccctaacactaaggcctcaaaacatacaaagcaatagctgacatacctgtagggaggaaaacataaaccaacaaccaaagctggaaacttaatacgccctatagtgcacactgtggtgctgccaggatcctccttcagggttgaggcatccatcccagcagctgccgggtgagtggctgctgatggctcacagcaaaatacttccttgggagttgtcctaactgcagggggctgcctctcacaagtcacgtcttctccccgggggaagtccatatccaaagactgctcagtgcaggcctcaaagacctggccccctgtcttcaacttgcagcctctataaagggccatcttggcttaagagttccctgtgagaccaactgaggcctctgttgcagtcatacagcatttaaacctattactctgtccagttatccttatatcactcctgtacaggcattttttctagagaacactacccagtaattaccttgtatgcaattctccatctcagaatctatttatagggaatctgccctacaccagttggtaccagcagttgttccaagaacgcaaactctaaaatggaatttttttctttttgaggtggggtcttgctctgtcgcacaggctggagtgtagtggtgcaatctcagcttactgaaacctttgcctcccgggttcaggcaattctctctgcctcagcctcctgagtagctgggattacaggcacccaccaccacacccggctaatttttgtattttttagtagacactgggtttcgccatgttgtccaggctggtcttgaactcctgacctcaggtgatctgcctgccttggcctcccaaagtgctgggattacaggcattagccataaaatggaattttgaaactgtgttacctgccacctagctgacaatgagggagggccctatgacttgtgattggcagagtagtgataatgatagcatatgtcaggttgtagcaaagtaattgttaaaattgtcagtggtgttgaactggggtggaatgttgacagaagggaacgcactggtgggtgctatatctcagatctttataacactgggggaagtggtaattctagagatgatggaattgaatggctattaccaggagctattgacaatgacggtgattagtgacaaattaattgaaaatgtgagcgtcagaagacttctttgaagcctgacagcaaaacagctgagaatcaggccctaacttcagctaagtttgaattctaaatcccagcaagtttgctatgccaaggtcaggatcctgctgggaaggagtagaactctgagatttgggatggggacattttgatttgtgcatgcaaacaccttcaaacaccaatcactctgaatttctcaggcttgctaaagtggcccactcctccaagtctaaagctagggctctgccttgcttgaagatgatgcagactgaggcctctacattgcaatacaacccgtgccccctcaggatctacctaccctttcctctccctaccccatccactagaccaataactagaattaagtcaccaaaaaaacccaacaggggaaattctgggcatgataagagaggaaaagaaccatcctctgaagttactacaggccctagtttatatgtatctgtaggaaccaggacagtatgtatgagactggaccctgaggatgctggatcaagaaggtaaaacatatattagagtaccagagagtttattgaaaaggagcacattcctggccaggcacagtggctcatgcctgtaatccaagcactttgggaggctgaggcaggcggctcacctgaggtcaggagttcgagaccagcctggccagcatggtgaaaccctgtctctagtagaaatacaaaaaattagccaggcgtggtggcaggtgcctgtaatctcagcaactcaggaggctgaggcaggagaatcgcttgaacccgggaggtgcaggttgcagtgagccgagattgcactgttgtactccagccggggcaacaagagcgaggttctgtctcaaaaaaaaaaaaaaaaaaaaaaaaaaaaaaagaagaaaaagaaaagaaaaagaaaaaagaaagaaagaaagcacactcctgtgatacgggacttaaacactctggcaaggatgctaggagatggggattagagaaatttagagaaatacatggctcatgttaagcagaaaatgtcagaattgcttgacaaaaggtaaaataagaagttaaaaggttcagggaactgggcatactagaataggtagagtatgtaaggctgaaataccagctgtctatgtttcatcagaaagtctggaagatcatctgctgcgataaagaatgtgctagagagaggcaccagcatcattgagaaactctgtggtagctgtcctctgcaggctgaggctgacagtaggggatttgttacaagactgggcctccctgaggatggctccagaaataaggtgagctcaattcacataatgagcagtaagattaaagtggaagatggggagagggaaaggggaagaggggctttatcttcagagaactttcgaggagattaatagaacatagtgtctctaaagacaagaaatatgggcaaacaacaggggaagtaatcagtttatacggtcaagtgaaataaaggatggataatcaagaaactgaggctaatataatgtaatgatcactgccattttcaaacccagaacccatgactgaagaagccaaatcttcagaagtcaggaccctatctcaccaccatgaatatatgcgataatgattttcccagccccctcccacccaaagggacctatggccatttactcaggtatacaggaaaaagggagtccccagaagcttcaaggctgctggacaaagtttctgagttggccgggcgtggtggctcatgcctgtaatcccagcactttgagaggccaaggcaggcagatcacgaggtcaggagatcgagaccatcctggctaacaaggtgaaaccccgtctctattaaaaaaacaaaaaaattaaccaggtgtggtggcgggcgcctgtagtcccagctacctgggaggctgaggcaggagagtggtgtgaacccgggaggcagagcttgcaatgagccgagattgggccactgcactccagcctgggcgacagagcgagactctgtctcaaaaaaaaaaaaaaaagaaaaaggttctgagttgacattgatacttagggaccttaggcaacatgatggcctctatgttaaaatggagaagtgtggcagccaggtagtccatgaaagtctgtctcatggcaggcccacaggattcattgccccattcagtggtaatttccaaagaccttgattgtataactggaatggatgtacttactgttggcaaaccaaattagttccttggcctatagggtaagagctaccaaaaaggccaagtggaatactctgaaactacttccctaccccttccttggccaagacataagtcaaaaagtgtcacttccagagggaatggcagagattcatgcctctcttaatgacctaaaaggtacagggtggcagtcctcattgtatccccacttgatttaacagtcaggcccttcccaaacccatatggattatgaggatgacagtggattattataaaagattgaacaagaatttgctccaattgttttgctagaacagactgagacatccacaattacatggcatccaggctttgctctggcaagtgtgttcatctgccaggtgagcaagacatggcaggtaagtcggaggccttggtaaaagacaagcactacagagggtggagatggatcctacacaatttcaggggcctactacagcagtaacattttaggggcaagacagcaatggtctccaatacagagggtggattattgtgtttcacattcctacctctttttttttttttttgagactgagtctcactttgtcacccaggctggagtgcaatggcatgatctcagctcactgcaacctctgcctcctgggttcaagcgattctcctgtctcagcctcccgagtagctgggactacaggtgtgtgccaccatgcccgctaatttttttgtatttttggtagagacagggtttcactgtgttagccaggatggtctcgaactcctgacctcgtgatccacccaccttggccccccaaagtcctgggactacaggcatgagccaccatgcctggcctacactcctacctcttaacaaggaagcacaatccttgataagaccttttgggtttcaaaggcagaacattctaacttgagcaagaatcatgacatggaatgctgtcagctctgagtggggcacagagcaggaaaaggctaggcagcaggtccaggctgtagttcaagcagtacttccacctgggccatatgacccagcagctgttatagtagtagaggtatctgggctgcaaaagacaccatgtggagtttatggcaagccccaccatgtgaatcacaatatagacccctcggattatagaacaggtcttgtcatcttcagcagagaattacatgccattcaaagatcagctcctagcatgacactgggtaaagaacttgaccatggaacatcatgtgaccttgaccagacctgtttatcatgagctaggttccatcggatgctttaagtcatgaggtcaagcaagtctagcagtaattcataagtaaaatggaagtggtgtatgtgagtttgggcatgttttaatataggtgttattattatttaagtatagtaagtccaatagatcagaagatgactggcattgaaaagatagtttgtaatacagatcccagcagaagggggtattccatgccatggggatctccacgaagaagcactgggttggtcaggaggcagagggtggggagttgtggccaagagcatttattgtggtttccatgggaaggaatgatgaggcatggtaagtggattcagaattggctagtttgaataatttttttttttttttgagactgagtcttgctctgtcacccaggctggagtacagtggcacaatctcagctcactgcaacctctgcctccttggttcaagacattctcctgcctcagcctccccagtagctgggattacaggcacgcaccaccacgcccagctaatttttgtatttttagtagagacaagagtttcaccatgttggccaggctggtctcgaactcctgaccttgtgatctgcctgacttggcctcccaaagtattgggattacaggtgtgagccaccacgcctggccagtttgaataattttagtgtgccctggggcataagtctgtgcacagttgtctgttacttaggtacaatgtgcgtggagtgaagaaaaagtgggagagaggagtaattctttttatttttttggtgctggagtgattagaatagggggatagtggcccagagataagaaggtgcctgcgggtgtgggctctggactggttggtttgcatttgaaaagtgcactcacagacaaattgttaatgatctctaggaactgactaaccctggtaagggcagtccctcagcaagtcttcagatgtcaaagcatcagaatacataaaataaaagacatggttaacacagggcacaagcaagaccaaagtggataagctgcacaggcagatggctcagccttttatggcatgataacatgacaccttccctcagtgcacacctatgattgtgggggaaccagctaatggaggaagaaaaagtccaaccctggttcatggatgagtttgctcaatttgtgggtaccagctgaaaatgtgggtaccagctcctatatcatagccctatttaagagtggccttgaaagaaactgatgagagaatgtccttgcaatggacagagctggtgaacacctggacgtttattttatgtagaaagagaagtggacagaagtaaggatacacacgaaaaaagatggctggcttggatggttggtcaagggacttagaagatggaaagactggaggcaaggaggtctgggggaaaatccaagtggatagagccacactagggggcatgaagtgtgtcttagtctgttttgtgctgctataacagaaaatcgcagagtgcctaatttataatgaacagaactttactgactcacggttctagaggcttggaagtccaatatcaagaagccagcatctggtgagggccttcttgctgcatcattccatgtcagaagcacaaagagggggagaaagggagtaaaaggggctgaacttcccctttgataacaaacccacattcatgataacagcattaatccattcactctgctctcaagtctaatcacttctcattaggcctcacctcccaacactattgatactggggattaattttccaacatcatgctttctgggggacacattcaaaccatggcagggtgtgacagtctttgtgtcatatgttaatgttcaccagagaggatccactacagaagaagcatgaaactaccaagtagacgaaagacttgtccagttgtcatcatccattctctgccattagctactccagtgctggcacagtgcatgatagagtacccatggaagcaggcatggaggctgtgcatgggtggatgtccatatgctcccattctccaaggctgatctaactattgatgctttgaacacccaacctactagcaagagaacaatgccaaatgcctggtgcagtataatcactggaggagcccatcaagctcggtagcaagttaattacataggccactttccactctggaaggatcagagatggatcttgactggaaaagacacatgtttgggattcaagtttatctgtcctatttgcaaaatcttggagagcagaactctctaagagttccaacccagggttccaggtagcattcctgttatctggagggtttcaaaagtccaggaatggagattcctaaacaagagaaagaccatgatttgagttccagttctgctacatgctcctcatatgttctcaaatgaatgatttaaccactgccccacctctgttttcttcccttttttaatttaaaatttttatttttaatttgacaaatcataattgtatatattttatggggtacaaaatgatgctttgatatatgtatacattgtgaaatgattatatcaagctcattaacatataccttatctcacatatttatcattttttgtgtgtggtggaaatatttaaaatatattattttaacaacttgaaatatataagatgttattattgtctatggtcactgtgttgcacaacagatcttgtaaacttatttctcctgtctaactgaaactttgtaccctttagtcaacatctccccattctccacacacccccaccaccagcaactggaagccaccattctactctctacttctatatgtttggcttttttatattccacaaataagcaagttcatgcagtatttgtctttctgtgcctgccttatttcacttaatgtaatgtcctccaggttcatccatgtcgttgcaaaggatataatttccttctttcaaatggatgaatagtattccattgtgtatatataccactttttttttttttttttttttatggagtctcactctgtcgccaggctgaagtgcagtggcatcatctcagctcactgcaacctccacctcccaggttcaagcgattcttctgtctcagcctcccaagtagctgggactacaggcgcatgccaccatgcccagctaatttttgtatttttagtacagatggggtttcaccatgttggccagtatggtctcaatctcttcaccttctgattcgcccgccttggcctcccaaagtggagggattacaggtgtgagcgaccgcgcctggccaccacattttctttatccatttatttgttgatgaacgctaaggttgattccctatcttggctataatgaataatgcttcaatgaccatgggaatgcagatatctcttcaacgtgctaatttcaattcttttgtatgcatacccagaaatgaaattgctggatcatatgctaattctagttttggttttttgaggaacctccatactgttttctataatggctgtactaatttacattcccaccaacagtgtacaagggtttctttttcttcacatcctcaccaacatttgctatcttttggctttttgatcatcgccattctaacaggtatgagatgatatctcattgtgaatttaatttgcattttcttgatgattaatgacattgagtatattttcctaaatctgttggtcattgatgtatcttcttttgagaaatgtctgttcatgtcctttgcccatttttaagtttttttttttcttgctattgagttgtttgagttacttatacattttggatactaaccccttatcagatgtatcgtttgcaaatactttctcccactcggtgggttgtctcttcactctgttaattttttcctttgctgtgccgagctttttagtttgatgtaatccaatttgtctgtttttgcttttgttgtctgtactttctgggtcatagccaaaaaaaaatcattgccaggccaatgtcatggaacttttcttctatgttttcttctagtagctttacagctttaggtcttacatttaagtctttaatccactttgagttgatttttgattatggtataagataaggagacccccattttctaaactgtaaatgaagagagaaatattgtccatgctgcctaatctcacaggtgtcttaggaagatcaaatgggattctgaaatcaagcagttatgtttcagagagtaacagagttgtaaaaccattgttttgccaccattacagtaaagacagaccaggcaataatcatctatggatgggaaacattagtgaggtaggaggaaattttgttgcagagcagaatgttttcatgggcttaaagtgtttctccacagacagcttattagttacagggagggaaacagtgattaaataacctagaaatcagagaaaaccttggttggttgatcaaaattgatattaacagtatgagactgtctttgtattgttataaagtaatttataaagaaaagagatttatttggctcacagttctgcaggctgtacaataagcgtggtgccaacatctgcttctggtgaggacctcaggctgatttcacaaatggcggaggggaaaggaagctaacatgtgcagagatcatatggccagagaggaagtgagagagagagaggaggtgtcaggctctcttaaaaaccagctgttggccgggcgcggtggctcacgcctgtaatcccagcactttgggaggccgaggcgggtggatcacaaggtcaggagatcgagaccatcctggctaaaacggtgaaaccccgtctctactaaaaaatacaaaaaactagccgggcgtggtggcgggcgcctgtagtcccagctactcgggaggctgaggcaggagaatggcgtgaacccgggaggtggagcttgcagtgagccaagatcgcaccactatactccagcctgggcgacagagcgagactctgtctcaaacaaaacaaaacaaaacaaaacaaaacaaaacaaaacaaaacaaaacaaaacaaaacaaaaaaaccccagctgtcatgaaaactaataaagccagaactcactcctcatcccgtactcagggaagggactaatcgacacttaagggctccacctccctctactccccacctccaacactggggatcaaatttcaacatgacatttgaaggcatcaaatatccacatcatagcagctacagacagaaattctgtgcctccaagtgtgaaacctgaacaggatacaaggttacctggtatttaaaccaagagagaataacctgaatctaatcttgacaaaacattaggtaactgtggaatgtgcttttaaaatacggggagaaaaagcaagactctgtctcaaaaaaaaaagggggagaatgaggaaactgtatactaacaaaatgcaagtatcagacagtaaatggaaaaactgaaaatattccagacaaaaggaggcaaagatactttgtaattaaatgtcataactgcctataggctagatcctataattgagggggttaaaaaggacattttgagtcatttggaaaattacaaaagggcagtaggatagttgaaagtatcgtatcaagattaaagttatagatgttgataacagtactgtggttatgtaagagaatatttcaattcttaggaaaaccgctcagatgttattatgtatttaggggtaaacggccataacatatgtaactcaaataattcaggggaaaatattatatgtgtatatatatgtgtgtgtgtgtgtgtgtgtgtgtgtatcacctgagaaaggagagaggaagagagagcaagaacacaagcgagtgacagcgcacaaactattaagtggccacaaaaatggagaaaatattaaaaatatgtgaatctaggtatggagtatattgatgttctttgtactattctgattcttgcaaagtctacagtgcataatatcttcataatgcgttcttaggtgccttaattttttcgctctttaaattttcctgggaaataatttcaatcttatattcaaaaaggaaaagttaaggaatgaaaacagaccaggcgtggtggctcacgcctgtaatcctaacactttgggaggctgaggtgggcagatcacaagatcaagagatcaagaccatcctggccaacatggtgaaaccccatctctaccaaaaatacaaaaattagctgggcgtggtggcacatgcctgtagtcccagctaattggatgctgaggcaggaaaattgcttgaacccgggaggcggaggttgcacgagccgagatcgtgccactgcactccagcctagcgacagagagagactgtctcaaaaaaaataataataaaaataaaggaatgaaaacaaaaataaacacttaaagatacattaacaagatactgtatatgcaaatattttattaaggaaattagacaattttgaaaaacattaaacattccttaagtaatggacagcagagcctatatgggaaaaattttgatgagacccttagttcataaaaacaacacaaaggtgtgataacgaaaatcctctcatgctcacacaaaggctgtgaatagaaggttttagggtaggacagggcaatgtttctccagtaagaaggatgtcattcagtcccttcactctgtagttcttgtcttcagggactaggtacgctgtgaactgaatacgtgtgtccctctaagttcatatgttgaaatcctaaaccccaatgtgatgatgttagagaggtgattaggtcttggggaggtgacaaccttatgaatgggattaatgttcttataggaagggacaggggagccttctctttctttttccctcccttcctctctgccattgaagatacaaggagaaaatggctgcctgcaaatcaggaagaatatacttacctgacacctgatctgctggcactttgatcttggacttctcagcctccagattgtgagaagtaaatgttaattgtctaagctagcccgtctttggtaatttcctaaagcagccggagctggctaggacaatgtgcatgtactccaggggggacttcatatgataaaattggatggaggcccaagaagggacagatgtagccttagcctagctcttgagagcaccagggctcaaggctaccttccagaagaaaagcgagataactgagaggtgaggatacatgggctcaaaatattctctagcctgtgctgaggtgtgaggtccccaaagtcatgagactgattcaataaatgcattttcttctatgttataggttgagggcattagtcttgtttatagatgaggaaatggaggctcagagagatgtcgtgacttagccaaagtcagtgagtagaggcagagtcaggacctgaactctgggggtctaccgccaaggtaaccctgtttttatgttttagttactcatacttgaagcaaacatggtggtcttggaacctgtttctcagctggaacctgtttctcagctggcaataatttcttcagttggaaacggaggtaaattaatagaactaattaaaagaagggtcctgccgggcacagtggctcacgcctgtaatcccagcattttgggaggccaaggaaggtggatcacctgaggtcagcagttcgagaccagcctggccaacatggtgaaaccccgtttctactaaaaatacaaaaataagccgggcgtggcggcgggcgcctgtaatcccagctactcgggagatgaggcaggagaatcgcttgaacccgggaagcggaggttgcggtgagccgtgatcgcacccattgtactccagctgggcaaaaagagagaaacactgtctaaaaaaaaaaaaaaaaaaggtcagtggaaatgctagatgcttagcatattttaaaattcaaaggggctctggaaaattcccgctgtaacggtgaaaaatgtagaatgcaaccggaagctggtgtagaagcgggggttctccagtccccagcagaggcagggcctcacttgtcccatctcaagtcctgttccttccctgtggcctcctaggcttcgcctcctgccctccactgcgggagttagaagaaggaaagaaagaataaagattaaagtgtagataaacgaaacagacaattgaaaaacagtagacagatttcataaaatcaaaagttctttttttgaaaagataaaattgacaaacatttacctagactgaccaagaaaaagagggaagtttcaaaataacgaaattagagttgagagtgggaacattactataggtgttacagaaagaaaagagatcataatagaatactgcgaacaatgtacgccagcaaatcagcccacatgaaagggacagcgtcaatttcagagaattggcgccgggaggggcacgggatcaccgtgcacagtgagtgctgtacaaagtgcctgtgcagctccccgaagccgcaggagggcgcccgactaagccttttctgccctgcgtgaggcgcatgcgtgttccgtctgcagctgcagacgcccatcctgggagtggacaccagcttcgttccctctcagcccactcgggaagcgccacacggcttcggcttcggacgatccagggccgcgtcctctgtgaggaaacagctgtgacggctgaggagggagggaccagctctaactgattgcttaagttgttacagatggtacagagccagtggctgagttttgtaaatcaggtgtgttcattgagcgaactttccacttcggaatattcagcatctgaggaggttcagtttgattttgtctatcgctggcggggcgcgggctgacgcctgggacccctgcacctggggaagccgaggaagatcgcttgagcccaggagttccagacaagcctgggcaacacagcgagaccccgtctctacaaaaaagaaagaaaaatgtgtctatctccaacccaatggtgaaattaggatgtctgtaatctcctcgtaacatcccggattatacattattactttttttacatttcttttttgttcattttcaaaattggaaaatacattcacttgtcttgtaaaagtttgtcgttaaacatacttgcaaattatgttttgcaagagaaaaaaacttttatttttgtttttctttgttgtaagcaagggcaatgcaggtcttcttttttgtcagaattttttgttggaaagcttatttaattttccacttgtttcaaaatattatcccatattgatgagttgcacagaattttttttttttttttttttttgagacaaaagtcttactctgtctcccaggctggagtgcagtggcatgatctcggctcactgcaacctccaccttccgggttcaagcaattctcctgcctcagcctcctgagtacctgggattacaggcgcccgccaccacgcccagctaatttttgtatttttagtagagacggggtttcaccatgttggtcaggctggtctcgaacccctgacctcgtgatccacccgcctctacctcccaaagtgctgggattacaggtgtgagccaccacgcccgggcgagttgcatagaaatttctaatctatttgcacgacaatgcttttgattttggcctagtgtatctcctcattcaatatgatatacattgtattatatatacattaaaaaatataaatataaatgtattacttatatatgggtatatgatcagtgttgttagtttgggctggaagtggtccaactgcagttgctctgcctgtcagtgccacacagatgggaaaatcccagctcataattcctgagcactctctaccctgtatgtccctgccacaatcaagtgagtcccttctgcctctatagacactaaaacatccccatagaatcccagagggcaagagtcagagagcggacatgcacactgtccaagcatctctttgcctgacttctgaagaacacgtgtggacagactccaattagtacaaacacagaaaatcacagctgacactacagccgtcttctggcgttatgagagtgaactgaagcagagattccagggcagcatgccacttatttggaagaggaagttgtgcaagtaagtgcacttttccatggagtttgacatggggcaaaaaagggcagacagtttcagggtactcagtggaggaagtggtttatgtagaaaagtggaaatcaaacaactccatgtttccacagctgagatgtcagagaagcctaggaaaaggcaaattccccaaaagaggtcacgtttcaattgtgttttagtcccaagaaaatgacttaaaattgtttccacagctgagatgtcagagaagcctaggaaaaggcaaattccccaaaagaggtcacgtttcaattgtgttttagtcccaagaaaatgacttaaaatactcattggattaaaatatctgggtagtgccaggcatggtagctcatgcctgtaatctcagcactttgggaggttgaagtgggtggatcacttgagttcgggagtttgagaccagcctggctgatatattgaaaccttgtctctactaaaaatacaaaaattagccgggcatggtggcgggcgcctgtagtcccagctacttgggaggctgaggcagaagaatcgcttgaacgcaggaggcgaggtttcagtgagctgagatcccgccaccacactccagcctgggtgacaaagcaagagtccatctcaaaaacaaacaaacaaacaaagactaatttgaccacggcctccttttgagatcattcttttgccagactcctctgacatctcaggctgactgtcttcaaacctagtccacgaacactccttgctggtgtcctgtgcaaagcccccctgaagagtatcagggaacattctgagacccagtccccacccgtgtgcccctttcactatagctgccttggaaacctcctgcatgtcttcacttgctgcagcaatttctcccatcattatcttgatggtgatgacatctgaaagctcagtctagatttcatttgaggcacagtctctgcgtgttataggcacttaagatgtaatacatttcaaactgaggccctcaacttcctccccaaataaaagtgacttgtcctctaatctctaatctcagataatggctccactagtacccagtcatgaatctgacacggcctctcaaaaccactgtcaagcatagctgtgatctctacacggagctccacaatcgccattcacttccacaccaatacccagacagtattcccaccccacactcacactgctcagtgccagtttaaatgtcagttcctcagatgatacaatagttggcatttaaaaaaccaaaccaaacgataatgtttcaatgtccaaaactgatgaacacattttgcttagttctttcctaaatgtggaagtggatctgatatataattattttctccctctgcttcccaacatgttctaatacataatttttagcgataccagtcataatgggggtcccacaaaagaagtttttgtaagctgaaattaattgacagctatttaagactgtcactgtgtcatgaggaattgttggacatgttcaaatgaaaatgagataagctaagaagtatatttttaaaatgttattgatatgtttgctttcattaaagccaggaaggcaaatgtattaaaactttcctttggtataaactatttaaagttaaaatgatgtgagtttttttttcatttttaaaatagatcagttttattctgctagttccataaaaacaatgtaaacacaagcgttctgtacatcttgctggtgaattcacataatgcttagttccctgatcctttgacctcctcgtcttctccagttattttctgtctggaccactggcctcaggagtggagtggggttggggcttaggagagagcaatgtggctttttggtatgacttgttttattgcttgccctctcagcacactcctgtttctcctaacacaaagtctgagatttaagcccttaaacctgtaggtttcaccgtcagctttttctttttctttcttttttctttttttttttgcataggcattactagggacgtgaatgggagactggtatagaaagtggtgaggagccgaagccaagaaattgctttaaacacaagatgaaaatgctctgttctgtccacacaaagaatcacctaatactggtgtgaggcacctcacttagctgtggagaagtccctggaattagatctcagaaagacagttccagctttaagacagtaaaaccttttggcaatgggctaattgccttaaaggaaagaagggttctacttgaaagaacttgcaggtggagaaattgtcctacaaagattcttggaaatgttaatggagataactgacataggtagctgtgggccaaccaggagctgtcaacagcctgatctcagcaaaaccaggacggccagttaatagttccttcagttctctgatggtcacaaatgtaattttatttcatttcgccttgtggaggttctgcaacaaatgtaattttaaaggaattgggagccagaaagataaatgcaactccttcaactatgtgacagggcagactggtgaatctgggttcccagagtgtggagcaagtgccctgcatcagaggacggcccaggggaaacgtgcatgatgccgaaccccacaggacagaattacttcaatcgcctggtcctgactactacaaggaggaagtctcagtgtctcagtttgcatctacgctcagatttctttttcttttggagacagagtctccctctgtcgctcaggctggagtgcagtggtgtgatcttggctcactgctacctccacctcctgggttcaagcaattgtgcctcagcctcccctgtagctgggactacaggcgtgcgccaccacgcccggcttatttttgaatttatagtagagacggggtttcatcatgttggccaggaatgatgcgagttttaatacactcactttacagtttcttatgtttttaaactactttcacgttgtagcaaaaacgaaccttaaaggcttcacagaggccggtccacgggaggggagcgccggtctcccggtcccgccgggctcacagggacggagcggcctgggattccgcccacccccttcccgccgtcagcgattcctcctcctcggagggtctggggacttctcccagaagccgccacctcgcgccaggacaccgggagttccgccgctccctgcgagagggaactggccagaggccctgcggggcaccgcgcgcgagtgaggcagaaacccaggcaccatgcagaaagccccgaaaaatgtccctggagaagccggggaacagctccctccacagccgtcagggcccgcacaggctgtttcctcacggaggactcggccccaggttgtcacgaagccgcgaccgcgcctccccggggtcctcaaggaacgcagcgctctgcctcactgcagacaaggcagtccgcaggcggaacacgcatgcgcgccggcaagtcagccagggcgggttcgcgcgccctcttgcggccctctaggtgcagtgcagggagctttgcgttttagggacttgggctccctccggccatcctctattgctttttggtattttcagtagagacgcggtttcgccatgttggccaggctggtttggaagtcctgacctcaggtgatccacccgcctcggcctcccaaagtgctggaattacaggcgtgagccactatgcctggccctggccatcctctttaactactgaacttcagattattcaaagccgttacactccacccaacagcttcagaatatcctctagtattctctaacacgcatggaacagtctccagattagaccacaaattaggtcacaaagctagtctcaatcaattttaaaagactgaagtaatacaatattttctataaccacaatataaggaaacattaacagaaggaaaactggaacattcacaaatacgtgagaattaaacaacacactcttaaacaaccaatggtcaaagaaaaaataacatgggaaattggaaaatacgatgagacaaatgaaaatgaagcacaacataccaaaactatgacaatcagtgaaagcagtttcaaagggaaaattttacgagtaaacatttacctttaaaaaacaaagatatcagataaataacctaactttacaccttaaggagctggataaagaagagaaaacaaaacccaaagttaggagaaggaagatgctatagtttaaatgtgtcctccaatgtccatgtgttggaaacttaatctccaatgtaacaggggtaagaggtaagacttttaagaggtgattaggccatgaggactctgtcctcatgagtggattaatgccattattaagggagtgtgttcctttcaaaaggacaagttcagcactctcttgctctctcttcccttttcttggcccttctgctttctcccatgggataacatagcaagaaggccctcacaagatgctggcaccttgatcttggacttcccagcctccagaactgtaagaaaataaatttctgatttttgaaaaataaattatgtggcctgtggtattttgttgtagaagcacaaatggactaagacagaaggaaataataaagattagagcatagttaaacaaaatagaggatagaaaaatagggaaaaaatcaacaaaacccaaagttggtcctttgaaaaggtcaagaaaattgacaaaacttcaggtagagtaagaagagaaagattattaaaacactgttattttattatttttcctaattatttaacaatatttaacagtaatataataaaattattgcaatatgaaaatttatataaaactaaaacattaaatcagaaataaaagtggggacgtgactattgattttgaagaaatacacagaattataagagaatattaaatcaattgtatcccaacaaagtaggtaatctagatgaaatggatacattttgagacagagtctcacactgtcatcaggctggagtgcagtggcacgatcttggctcactgcaacctctgcctctgcctcccgggttcaagcgtttctcctgcctcagcctcctgagtagttgggacaacaggcgtgcaccaccactcccagctaatttttgtatttctagtagagacggggtttcaccatgttggccaggatggtctcaatctcttgacctcatgatccaccctcctcggcctcccaaggataaattcttagaagcactcagacttccaaaacagattgaagaagaaatggagaatctaaggatatcttttttttttttttttttttgagacagagtctcactctgtcacccaggcttgagtgcagtggcacgatcttggctcactgcaatcttggcctctcaggttcaagcaattctcctgcctcagcctcctgagtagctgaaattacaggtgtgtgccaccacacctggctaatttttgtatttttagtagagatggggtttcaccatgttggtcagactggtcttgaactcctgacctcgtgatccgcccgcctcggcctcccaaagtcgtgggattacaggcgtgagccactgcgcccggccaggatatctttttaaataaatagaatgaatcagaaaccttttaacaacaaaaagggccagggccaaatggcttcactggcaatttctacaaaacatttgcagaagaattaacaccaatccatctcaaactctaaccatctgtcctacaccccaaaatagaagataaccgatcctaaccctttctatgaggacagcattaccctagtatttgtgaaaaagacttcataagaagagaaaaccaatacaatgttttctcagtacaaaccaatatcttttatgcatacagatagaaaaaatcatcaaaatactaccaaattgaattcagcagtatattaaaagaattacacactatgattagttcaatttattccagatacacaaattgattccacatacaaaatcaattactgctgtatcccacattaatagaatgaggggaaaaatctcacaagattattgcaattcatacaaaacaaatatttgacaaaattcaataccctgtcatgataaaaacaacactcaataaattaggattagaagggagctgcctcagcctgaaaaacccatagctaacatcaccctcagtggtgagtgcgtgtgatgaaatctttcttcctaagatcatggatgtcctgtcttctcaccacttctattcaacatcgtaaggaaagttctggctacagcttacacagtaaatagaaataataggcatccacattggaaaaagagtaaaactatttctttcacagatgacatctagtatattgaaaattttaaagaatatagacacatgtgcacacacacacaattagtgagcatcagtgaattccacaaagcttcaggatacaagatcaacaaacaattggttttatttctatacactaacaacgaacaatctgtaacgaaattaagaaaaaaatttcatttacaatatcaatagtaaaaatactggggaatctggacatggtggatcatgcctgtaatcccagcactctgggaggcccaggtgggaggattacttgaactcagagttcgagaacagcctgggccacatagcgaaacccctgtctctacaaaaaatacaaaaatttagccaggtgtggtggtgtgtgcctgtagtcccagctacaaaggaggctgaggtgggaggatgccttgagcctgggagacagaggttacagtgagccaagatggcaccactgcactccaccctgggcaacaaagccaggtcctgtctcaaaaacaaacaaacaaacaaacaaacaaacaaacaaagaaacaaacaaaaccaaaaacacttgggaatgaatttaaccaaggagttgcaagagttgtacactaaaaactgcaaaactttgttcagaggaattaaagaaggtctaaaatggaaagacattctatgtaaattttaagacttaatattattaaaatggcaatactactcaaaatgacctacagatgcaatgcaaccctatcaatacctcaatggcctgtttttgcagaaagggaaaagctgattctaaaattcatatgggtgttaggtgtggtggctcatgcctggaatcttaacactttgggtggctgaggcaggaggatcatttgaggccagaggatcatttaaggctagaaatttgagaccagcctgggcaacgtagcaagaccttgtctccacaaaaaattaaaaaaaaattagcggggcttggtggtgcatgcctgtagtctcaactactcaggaggctgagtctggaggaacgcttgagcccaagaagttaaagctacaatgaactatgattgcatcattgcactccagcctgggaaatagaatgaaagcctgtccaaaataagataaataaaataaaattcatgtggaaaagtaggaggtcccaaatagccaaacaatattgaaaaagaacaaaattcaaggacccatgtgtcttgatttcaaacattgctacaaaattacaataatcaaaacaatacaaacttttcatcagggaaatgcaaatcaaaaccacatcatctcagcacagttaaaatggctttgtatcaaaaagacaaaaaaaaatgaatgctggcaaggatatggagaaagggcaacctttgtacagtgctggtggaaatgtaaattagtatagctgctatggaacagagtatgaaggttcctcaaaaaactaaaaatagaactaccatatgatccagcaatcccactgctgggtatatatccaaaagaaaggaaatcaatatattgaagagatacccgcactcccatgtttactgcagccttgtgaaatactgcagtgttgtgaaatactgcagtgttgtgaaatactggttatttcacaatagacaaaattgggaatcaacctatgtgttcgtcagtggctgaatggataaacaagatgtgacatatgaatatacaacagaatagtatttatccatacaaaagaaatgcaatcctgacatttgcagcaaccctgaatggaactatcattaattggaactagagattaattaaaataagccagggacagaaaggcaaagatggcttgctttcactcatatgtgagagctataaacatggatctcaaggagatagagattagattgttggttaccagagctgggaagggtagaggaggataaagagaggttgattaatggatacaaaaatacagttaaatagaaggaataagatttagtgttcgatagttcagtaagatgactacagttaacaataatctactgaatatttcgaaatagccagaagagaagaattcagatgttcccagaataaagaaatatttgaggtgttggatctcccaattgtcccgattggatcattacgtattatatgagggtatcaaaaatcccatcttccaaaaatacatttgactattatgtatcaatagaaaataaaaagtaaaacaaaacttcttgccagcataaagatagatcaatggggtagaatttagagtatagaaataaacacatatctatgatcaatttatttttaaaagaggtattaagaccattcactatagaaagatactttcttcaacaaattgtgctaggaaaactggatatccacacacagaataacaaagttgaacactttccttatgccatataccaaaaataactcaaaatggatcaaagacataactataagagctaaaattataaagctcttagaagaaaagatagagataaattttcatgaccttggattcggcagtgaattcttatgtgtgacatcaaaaacacaagcaacaaaaggaaactagataaattgaactccatcgaaattaaaacattttctactggctgggagggctggctcatgacgggggtgaaaccccatctctactaaaaatacaaaaattagctggaggtggtggtgcttgcctgtaattgcagcttcttgggaggctgaggcatgagaattgtgagaactgcttcaacccaggaggttgaggttgcagtgagctgagatcgcaccactgcactccagcctaggtgacagagtaagaccctgtcttaaaaaacaaaaaattaccataaaaccttttctgcattaaatgccactatcaacttgagtgaaaagacaaacttcaaaatgagaaaaatattttcagatttgtcttagtctgttttgtgctgctataatggagtaccacagtcggggtaatttgtaatgaagagaagtttactggctaacagttctggaggctgggaagtccaagaacaaggggctggcatctggcaagggccttcttaatgcatcatcacatggtggaaggcatcacatggcagaagggcaaagagaggcagagagagagtaatagggaatgaatctactcccacaatactggcattaattgcttcataagggcaaaattctcatgacttaaagacctcttaaaggtctcacctcccaataccaccacaatggcaattagatttcaacatgagttggccgggcatggtggctcacgcctgtaatctcagcactttgggaggccgaggtgggtggatcatgaggtcaggagttcaagaccagcctggccaatatggtgaaaccccatctctactaaaaaaatacaaaaattagccgggtgtggaggcatgtacctgtaatcccagctactcaggaggctgaggcaggagaatcgcttgaaccttggagacagaggttgcagtgagctgagattgctccactgcactccagcctgggcaacagagtgggacttggtctcaaaacaaaacaaaacaaaaaaaaccccacaagttttggaaggcacaaacattcaaaccatagcaaaatcatatattttataaggttctaatatgcagaatgtataaaaagtacttacaattgaatgaatacgatacaatggaatactattcagccattacaagaaatgtggttttgatatatgttataatgtggatgaatctagataacatgctaagtgaagaagccaggtacaaaaggccacatattatattccatttatatgaaatacagaaaataggggccaagcctggtggcacatgcctgtaatcccagcactttgggaggccaaggcgggtggatcacaagttcaagagatcaagaccatcctagccaacatgatgaaaacccgtctctactaaaaatacaaaaattagctgggcgtggtggcacttgcctgtagtcgcagctactcgggaggttgaggcaggagaatcgcttgaacctgggaggtggaggttgcagtgagccgagatcgcgccactgcactccagcctgggcaacacagcgagactccgtctcaaaaaaaataaaataaaaaataaaaaaaggaaaaaaaaaagaaaataggaaaatccatagagacagaaaaaagactagtggttaccagagcctgggaggaggggggaaatgtggagtggctgcttaatgggtgaggatttccttttggggtggtgacaaattctggacctagatagtgttgatggttgcatgacattgtgaatgtacttaatgtcagtgaattatacactctaaaatggttaggatgataaacttcatgttatgtgtattttgctataataaaatacacagcctcgagcccctgtgtaatcagcgtgaatccatttatgagggtggcaccctcatgaacacctcccactagaccccctctcccaacactggtgcattgaggattaagtctccaacacatgctttttgggagacacattcaaaccatatggtattccccacaatactgatgctcatctgtcatttccatgaagcccccaccactcaggatgcataaaagcttacttagtaggattgatgatgaggcttgcagtctccctgaggagagcctagggccccagaagcgagcttgcacctccaggccctattaaccattagaactcaatccctgttccaaacacaatcagttccttccaccccagcctccccttactgggtcagatttgactgggcattttaagtgcgagcgatgtagtcctctctcctgaattcaagttcctccccctacccagaaatgacaattgcacatacagaagctgatgcgtacagttttaaagaatacaatttctgtgtaaaagtgtcaccatacagttgaaaacatctgtatcacatatgtaacttgctgccagatgccgggccagtcacagtgcactctggctggatgtttcagagatactggttgcctatgaaatggtgaccatctgattctgcagaaccacaaagtgaacacaagtgatgattctaggcatcagtttgctagaaaagggatccagccctccacttgtcacccgaacctcagagcttcagccttggggtttcctttcagggctgtgttatgaaggcagaatccctccctggtcttcacggatgcagaaggagttgctgccaacttgagatctggcacaaaaactaagggaggacttggagagggagtgaggcctcctgagctggggccacagccccaggggagcccagctgcctccatggcccccatcacagagatggcctccccctggcctcgctgaccagagcctcagtggacaggtgtgaaggggcagatgggactccttcactttgctccagtcactcagggctccatctcatcagggcaagctctcttctcaccccacacacccttccaccccgacacgggcacatatacaactgccagtgtgtcccagccccatgatatccatccagacttcagcccaggctgtcccacctctgtgtcagccctcaacaggctttcggcacaggcttgtcgatcttgttaaatgaaaatgtgtttaacaaattgggattgcagaatcaggttgatttatagagtaaaatgctatctgtggctagggccctccagggccctgtgcacacatgtatgcatgctacagctccctgaagccacgcagctggagaacagagccaatcaggttcatctggccaggcaggcagcagtaggtgttcctgaaaccttgctcctgagaccccgtagctccaacacagaaagtctggccaaactgatctaccttggatggagcccctcacctactctgggtccccactctcaagtccttcccagacctagggtgtgaacggccagagtcagacccaacacctgccctcgtgtggagactgccctaccaagaggcccttcctttccattctataccctccatctctacagcaaagatgtcattcctcagccccataagtggcaatgtccccacattcccagccacggtcagctccttaaaacacaggagccaaccttctccatagcctccagggaggagagcatgcagggccctagagatgcccgagtttagggcatgtgacagaaggtgatagggacagagctcagctctgtgctgattcttcatgaacggcttgatgctctccctctggtgatgagtgagttctcacagtcttagttctcatgagaacttactgttggaaaaagcctggcacctcctccctagccatgtggtgccggctccccgtctccttccgccatgagtggaagcagcctgaggccctcaccggaagcagatgctggctccgtggtccttggaaagcctgcagagccatgggccaaataagcctcttttctttataaattaccttcttcaggcattcctttttagcaacacagacagactgggagggtgacccagccgcacatccaggcttctccctagcttgctttctttctttttttttgagacagagtctcgctctgtcacccaggctggagtgccatgatcttggctcactgcaacctccgcctctggggttcaagcaattttctgcctcagcctcccgagtagctgggattacaggtgcccatccggctaatttttttgtatttttagtagagacggggtttcaccaagttggccaggctggtcttgaactcctgacctcatgatccacccgcctcagcctcccaaagtgctgggattacaggtgtgagccaccgcgcttggccctccccagttttctaaagagggacctgggctcctcccctctgcagccatgggtatttaggccaggcatcttggcaggcattaaaccagtatcaaacccatcaggggtttcccccatgaggtttcagcaccttcaagagacttaacactcatgttgaaatttaatccctaatgtggcagtgttgagaggtgatttgggtcacgagggctctgctcgtgaattaagggattagtgggtgaatggattaatgggttatcatgggagcggcattagtgactttctgaggaggaagagagacctgagctggcaccatcagcccccttgccacatgatgccctgtgctgtatcaggatgctgcagagtccccaccagcaagaagtccccatcagcagccccttggccttggacttttcagactccataattgtaagaaacaaaagccttttgtttataaattacccagcttcaggtattctgttacaagcaacagaaaacagactaagacagccgaactactaagcacccagaatgctctgacatcatgggccagcgtgtgtggctaggggaacccaggcacacatttgaacagagtccaaagggacagaggataaaagataaaaggggtgggactctgagttggagacagccctggggctgggctgactgaccccgcttcatcaagagggcaggttcttgttgcctggaaactgattttagggcaacacagggttttccccctttgccagcaggtcactgcaagatgagctcataaataaaggctgaagatcacaaccgtcgctgggtttctgaatatcaagcatgtagatctcaggaaccatcagatcaccatctcagtaggttcttttcttaacatccagggaagtcttaaagccccttggtgcaaagcaagtgcatttattgattcataaaaacgtgcagatcagtacttttcaagaaaggaacattttgaggaggagccccttttatggggttatctgtgttgtcatgctgtgcagtaactcatccacctggggtgagggtggtggcagagtggaggaagtcactactgttatcagggactcgacttgggatccacttgatcctgactgtgttggggagagccttgacctctgacctcccaggcggggttggaggattctggtgaactaattctgtgtaaaacccttgcaggcctgcccccgccctttcccaaagtgcctgactgtgggagagactcttcctacatccaaggagtgctgtcccctcccaaaagggagtgtccaccatccgtgctgcaggctttcccctctacagtagaatttgtgccctgggctgcccctctcctctcagttggcctttctgcttgtgtggactcacaaagagtgcaggaagcaggacagggcccaccaggtgtgttgcaggggggcagccttgctctgcgctccacccagcgtcatgttcaccaccaggcgtctgggggtttcggtttcttctggctcacaggggtcatacgaggaccgcaggctgctgttcattggatttggcaggaatgttatcaccctgggctttggggaaacctcttctgccagccccctgcggttgtgctttggcttcctgatcttgccaggcctgctccacgcccacggctttacatctttgccaccaacagcttggcacaactatgcaatgactaccaccatgagatgctgaatcacctctttgtaaggcacttcctgagggcccagctggggaagggtgggcagtgcgatcccatgggcgtcctcaagtcctcccaccctaggttctgctcccagccccgggttccgggttcttctcattggaagttggtcttctgctgcccttgttatgaggccagtcaagggaggagtctcggttctccaattataggtgccttctcctgacctccagtttctgagggcctggacccatctttggcaagtcccagggcaatcagagcagttcagacctttccaaaagagcactcagcagcgcctgatccttgctgagcatcgtggagaatggaggagtgtggtagcgagctgaggacctgagttgctctggggacttggtaactgtcccatctcctctttgagcctctggggtatggcggccgattgagagtcttccatctctctggctgactgcctctctctgtctccatggaagaatcacgccgaccttgttgaaaccatcatccaggtgctctggaggcagcgcctgcctggaccagagcaagttcagccgtgagcccagcctctgtggctccctgcttgggatccaagtgcttccacactgcatccctggtggtcaaggtcaaggtgagggtgttcctggacttgggggaggggactgagagggaaggccaagggagcactgagactcagcagtgtgccccatttagaggcaactaggggaagggcggtgaagtgcaatgatccggtgctgggctggacagaagtgtgtgcccagcgacaaggcacttctctgtgagctccagcttctgcctctggggggtgggagacggaagcaaggtgtgttgtgctgagcgcacacagatcatgtatggggttagagagggtttttgaaagattttccttcttttgtttttgtgaattgagggactcaattcaggaggagatgctgaaagaaatgatggcatggtattcagtactaagaagaaatgagttattacaaagacatggaaacacatggagagaccctaaatgcctattagtaagttataggagccaatggaaaaaaagctacatacggtatgactccaactacgggacattctggagaaggcaaaattatggagacagtaaaaagatcagtggtagctaggggttgggggagggagagatgaacaaggacagcacaggggtttttagggctgtggaactactctgtgagatactatattggtgaatacatgttacacatttattcaaacccatagaatgtacaacactaagaatgaaccatcatgtaaactatggagccaccatgccccgcccttaataatttttaagtgtaaagttttgtggcattaagtatatttacatggttgtgcaaccatcaacatcatccatctccagaattttttaatcttcctcaaccaaaactctaccattaaaaataacatctcattcctccctacttacagtctctggaaacaaccattatacttcctgcctatgaacttcagtagcctagaaacttcttataagtggaatcatacaatatttgcccttttgtgactggcttattttacttagcatgatgtcttcaaggttaattcatgttgtagcacatgtcagaatttccttcctttttaaagccaaataatatttcattgtatgtatataacacattttgtttattcatttatccattgatggacacttggattgcttccaccttttggctgttatgataatgctgctataaacactggtgtacaaatatctgttcaaatccctgctttcagttctattgattatatactcagaagtggaattgctatttcatgtcatatttctaggttaaatttttttgaggaatcactatattatttaaaaaagcaactacgtcagttagcaccttacttctgcaagaatggccataattaaaaagtcaaaaacaacagatgtaggcctaaatgtagtgaaaagagaacgcttatacgttgccagtgggaatgtaaattagtacaacctctatggaaaacagtatggagattttttaaagaactaaaagtagatctaccatttgatcccacaatcccactactgggtatctgcccaaaggaaaagaagtcattatatcaaaaagacacctacacgtgtatgtttattgcagcaaaattcacaattgcaaagatagggaaccaacctaagtgcccatcggccagtgagtagataaagaatacatggtatatatacaccatggaatacaactcagccataaaaagaacaaaattttctgttttcttttaaaaataatagccactctaatgagtgtaaagtggtttctcattgtggttttgatttgaatttccctaatgactaagaatgttgaggatcttttcatgtgcttattgaccatttatctgtgtatcctctttgaaaaatgtttattcgtgtccattgaataattaatttataacttattatttcattaattaatgtaatgaaattagttttgaactgacattaatttataatcgacaggtaaaagttatatatgtttatggtatacaacatgatattttgatataagtatacactgtggaatgactaaatcaagctaattaacatatgcatcatctcaccttttttttttttttgagacagagtttcgctcttgttgcccaggctggagtgcaatggcgcgatctcggctcactgcaacctctgcctcctgggttcaagcgattctcctgtctcagcctcccaagtagctgggattacaggtgcatgccaccactcccggctaatttttgtatttttagtagagatggggtttcctcatattggtcaggctgctcttgaactcccgactttaggtgatctgcccaccttggcctcccaaagtgctgggattaaaggtgtgagccaccacgcctggcctacatacttatattttttgtgtgtggtgataacacttaaaatctcttagcaattttcaaacatacaacatattaactatagtcactatgatgtacaatacacctaaacgtattcctcctaattgaaatttgtaccctttgaccaatatctccccaactctcccacacccagtctctggtaatataagttcaactttttcagattccacatataagtgagatcatgtggtaccatgtgatatttgtctttctgtgcctggcttatttcacttaacatagtgccctccaggttcatccacgttgtttcagacaacagcatttcattctttttaaaggctgaatattactctatcatgtatatataccacatttgctttatccattcatccattgatggataaagctttgattgtttccatatcttggctaatgtggaaaatgctacaatgaacatggaagagcagatatctttaggaagtagagatgtcatttcctttgggtatatacccagaagtgaggttgttggatcatatggtagttctacttttaattttttgaggaaactctatactgttttccataatggttgtactaatttacactcccaccaatggcgtacaaggattcccctttctccacatcccagccaacacttatcttttgtctttttgataatagctattccaacaggtgtaagataacatctcattgtgatttaaatttacatttctctgatgattagtgatgttgaacattttttcatatgttagtcatttgtagacttttgagaaatgtgtaatcaattcctttcctcgttttttgatcaagttgtttattttctaactattgagttgttcacggtctttatatataggttgtctcttcactctgttgattattttcttggctatgcagaaactttttagcataatataattcactggtttatttttgttcttcttgcttgtgcttccagagtcatacacaaaaaatcaatgtctggaacaatgtcatgaagcttttccccaatgtttttttctaggaattttatggttttgggtcttatgtttaagtcttcagtccattttgagttgatttttgtgtatgttgtaagataaaggtccaattttattcttcttcatgtggatatccagtttctccagcacaattcacagaagatactgctttttcctcattgtgtgttcttggcacctttgttgaaaatcacttcactgtaaatatgtggacttatttctgggcagtctattctgttccatgagtctgtatgtttttatgccagtaccatgctgtttttattactatagctctgtagatttttaaaccaggcaatgtgatgcctctagatttgttctttttgctcaagatggctttggctattcagggtgttttgtagttccatatgaatttcaggagtttttttttccatttctgtgaaaaatgacatagaaattttgataggaattgcgctgaatctgtagattgtgttggtagtatggacattttaacaatattaattcttataatccatgaacacagtatatctttgcatttatttgtgtcttcttcaatttcttccatcaatgtttgatagttttcagtgtacagatccttggttaaatttactccttttttgtagctattgtcaataggattgttttcttgatttctttttcagatagttgttagtgtataaaaacactactgattttcaaatggtgattttgtatcttgcaactttactgaatttattttgtttatgagttctaatagttttttggtggagtttatagtgttttcatgtccttcacagagagaatataactttttcttttcctctttggatgtcttttatttctttctcttgcttaattgctctggctaggacatcctgtacacaaatattcatggaagcttaattaataatgacccccaaactggaaacaggtaggttcccaaatgcacttttaacagaataacatttttcatacttttgttaatgttttttcacttaccattatacatggataattaaatattcttccatagcataattgataatggcttgatggccattctatggattctaatagtttattcaatcaaggccttggttttaatcattaaagtttttttcctctcattttgactattaaaataattatgtctcatctggctgtttacaaacaggaatctcctgtttttagtcaataaataaaatatttagaagcggcactgaaatcccatgggttttatatacaccccaggaagggatagactggtggagcaaagcttgggtttgaaaagctccagtggaggaagtccccaggcccagactcaggccatgccagaagaaaggagaagttttgtctgaagctgtgcttggtaacactccccaccctcccacccacctgatattctcacgcctctgccttgtcaagacatgaatgaggcccagtttgtgcccaggtcattttgcgctttgccatatgctgtgtggaagctgcagagtggccattgtggtgctggtcaagaagggagtgccagaagattgacctttgtccctaaagagaacacctggctgagtccagggcctggttcgaatccagttccagggagcagggaaggtactgagccagtctcttccactgagtgcattccaagggtgttaatggagagtcttaagggatcagacacatgcaccctggggatcctctgttgcttttgtaccagctcatagagtcctagtagcctctgtgagctgaaaaagcctatttatcgccttggaatcagcactcctgccaacaagggttaatcgagatgggaagggaaagaatgtgcagcattatgtgactgtagtttgttatggtattggtggagtgaaattgtgagaaggcatgggaaatgtatttggagtcttataaaatctttataactctgagtcaggttggatctgggtcattaccgaattcctgtgatgtagggaaaatcatgtcaccagttacatctgctgagattctgccagtcaagtggtctctgcctcccaatattaaatgtccttgtcatcttgttatgctatattagcagggagaggctactgaggctgtcttgggaatgactgagcctctttgctgtttccagtcttgtagcttcaacagaacatgccatccatgctgaccttattgaacaagtcaatctcatccagaggtgtagtaggtggtggcccaggaaggaaatctgagaggtttcgagagtatctctccagttctccaagactttctcacaccccaaatccccgtgtctgaaatcctgctaggattagattcctttggcccatgaaggagtttttcttctctgcaaggctcctatggatgtgaaagtggtgatctcactgtcaccattcatcgtagaggagtttaagaaccatgagaattccaagatatcctgcagaatttccaggagcaagctcttgggaaattggacagagctagccccaggcagggcattttctcaccacttttctctgtgctactccggttttactggtcacatatctgcagtggacacagagttcccagagagtgtggaaggcatcaaggaccacaagtctgtgggctggatccagcttcagcctgatttatactctaacttctttccctctgacttgtaacgctccgagcactggccacacagaaaagctaccaggagggagatagcagcttttccctcagaaaacatgagtccagaatctgcccagaaggtgtttctcaccataggaaaagaatagtgatcctgctacgctgatcctccgctcacatttccagatagacctggattgtcctgggactcccacagcctggggaattggagcatcaggattttcctggcgataatatggccataagggacagagtagttcactgctcctgtgaaaagattaggagaaactcctggtgcagatgggatgacagagtttgaaagttttgaatcctgcttacctcagttattatgaggtaaaagctcattttcttctagggattttatatggaaagaataggcctccttctctgatttctatgggatgcaaaaattctcaaatacagagaaggcaatgtcaaaattgtaaggatgtgattgcccaaggcaggcaacagatgcaggagcaggacgcactcccacatgcagctgctgagtgtgcaaagcttttcagaaggctttgggcatgtgaattaaaaagccttatcaatatgtgttactttgcctaagaaattccatttttttatgatcccatggaaacaattaaggttgtttgcaaagactttcctgcagggttatcgaaattgtatttataatagtgaaaaattagaagcaattttagctcttggttccataaataaagtctatattttcgaggtatgacaggtggggaaggacactcaggttgggttccccagaaagttgtgagatggagatttgtatggaggctttcatatcacaacctgcagaatagaagagaagaaagtgggattgggtagagggagaagttaggctgctatgcagtctcagtaagggtgccagttgaccccaggaagagctgcagaactgagacagcccttcaaaattaccccaactttgagtggaagggccagaactttgcccctatgtcaactagtcattggctgtggctgtcccaggaacgacgtgtgttccagggcgacgggatgcccttcagctgagggctgtctgcaagccatactcccagcagctggagaacaaattcctcagttctgaaagggggtcgtgggtggcaccacctgacagccactgcaggccacaccttccaccacttggattcacttcttcatataagttttaggagaaacaactctaggatcctggtgggtctctttttccaggaagaaacttgtaagaggccaagggatggactgcagccaccgtccccactgcagttggtcttaaccctgcagttgacagtgattgctgctgtcctctgctgtccattccaggtgcccctcaacctccactggcacctctgctggtcttggtggcttcccagtggcatgatccagacattcatccctgagcccctggtcaccatgtgcctctcaggctatggctactgcacttatctatttactatgaaaatggggcaaggtagtacagggagctttccagtattaaagtgcattacctgggtgccaaacatatttctcccttcccccactgtgattaacactgtgtgttaatcgccctacttccttctaatcatcaggatcaaatacccctgtcgggatggtgactcctctgcttgctggctggctccttggcagcagctgtagtttacagctcaaaagaacgcttgatgtgtttcccaagggaattgtttcgacctctaaagctacagaacggaggttcgtgggatagggaagcacataaccgtcagctgggtggctggaagtgatggtgagcaaggactctcctgttcccactccttggttcccaggctgtagatgctgcttataggaacacaaccatataaaggcacaggtgtcccttgacttacgatgcagttacattccaataaacctgccttaagtagaaaataagtcaaaaatacatttagtaccccaataaaccatcataaagtcaaaaaattgtgagtcaaaccatcattagttggggaccatctgtagtcgatcagcgtgatctactggtattctaaccatctgctaaaataagacttagctctatttagaggaacataagtcaggaacatctataattttttcaagtataatgtttgccatcaaatgaaatattagaagtcatgcaggggaaaagaaagcatcaattggccagatagcaacagacccagaagcaattcatctattgcagttaacactcaaggatttttaaataaatattatttaaaataaataatatattcaaaagagaaaaaagaatgaagaattttagcaaataaatagaatccatataaaaagaagactaagattccagaaataaaacatctgagtaaaatgaataattcaaaatatggttttaatagattaaaaacaggataataacagaaatacaggtaagtggaaagtatccaggttgatgcagatagatagagaagaatgggagatacagaaaaccgtaagagccatctggaacatggtgaaaagtcctaagctatctgtaactggaaacctagaattagagagagagaaaacgaggtaaagcaatatttgaagaaacctgggtgagaatttccccacactgatgaaagacatcataacacagtctcaaaaagctctacaaaccccaagtatgattcaaaagcaaagaaaacccctgcacacccaggcacattgcagtaaaacctatgacagctaacagcaaagagaaaatctgacaagcagctagagagaaaacaatgggactcacaattcacaatggaccttttagtagaaactctggaagctgaagacaatgggatgtcattttattctagatgcttaaaaaaaaaaagcccggccaggcgcggtggctcacacctgtaatcccagcactttgggaggccgaggggggcggatcacgaggtcaggagatcgagaccatcctggctgacacggggaaaccccgtctctactaaaaatacaaaaaattagccgagagtggtggcgggcgcctgtaatcccagctacttgggagactgaggcaggagaatggcgtgaacccgggaggcggagcttgcagtgagccgagatcgcgccactgcactccagcttgggcgacagagcaagactccgtctcaaaaaaacccacaaaaaccaacaaacaaaaacaaacaaacaaaaccccaaatgacagcctagaactctatttcaagagaaattatcctcctaaatgaatgtaatatatatctgaaaagctgagagaatccactggaagactataataaaatgccagaagagttaatcaggcagaaggaaaatgacagcaactggaacaaggagcttcaggagagaattaagagcacgagaatagctaaatatgtgagtaaatataagcagacattgcttaaaaacaataatagtaatatcttcgggagtttaaaataaatatagaaataaagatctatgacaacaatggaacaaaaggcaaggagtaaatgaaattaaattgtcagtttttttcattgctttgaaatggcaaaatattaatttcaagagtgttccaatgagtcaaagattcatagggaatttaaagggctattattttcaaacatttcagtctcaggactgctttacactttttttttttttttttttttgaggcggagttttgctcttgttgcccaggctgaagtgcaatggcatgatctcagcttactgcaacctccctgcccctgggttcaagcgattctcctgcctcagcctcctgagtagctgggattacaggcatgtgccaccacgcccggctaattttgtatttttagtagagatggggtttctccatgttggtcaggctggtctcgaacccctgacctcaggtgatccgcccacctcagcctcccaaagtgccaagattacaggcgtgagccaccacactcggcctgctttacacttttaaaaattattgaggaacccaaagagtttttttatataggttatatctattgatatttactgtacttgaaattaaaatgggaaaaattaaaaatatttattttaaaaactgggcaggtgcagtggctcatgcctgtaatcccagcactttgggaggccgaggcaggtggatcacgaggtcagcagatcgagaccatcctggctaacacagtgaaaccccgtctctataaaaatacaaaaagttagccagatgtggtgggatgcacctcccagctactcaggaggccaaggcaggagaattccttgaacctgggaggcagaggttgcagtgagccgagatcgcaccatcgcactccagcctggatgacaagagcgaaacttcatctcaaagaaaaaaaaatcactaggaatgtggaagatttgaagaaaactattaaccaactagatctaattaatatttatagaacattaacatctaattgcagaattttcaagtgaaaattcttactttcgtgttattttcaagtgaatatggagcattaaccaaaaaatagaggctgggccataaagtaagtctcaacaaacttaaggattaaaataatatagtatgaggccgagcacggcagctcatcacctgtaatcccagcacattgggaggccgaggcaggtggatcacttgaggtcaggagttcaagaccagcctgaccaacatggtgaaaccccatctctactaaaaatacaaaaaaattagctggttgtggtggcacacacccataatcccagctatccaggaggctgagacacaagaatcacttgaacccaggaagcagaggttgcagtgagccaagattgtgccactgcactccaaccttggcaacagagtgaggctctgtctcaaaataataataaaataataataataataataataataataataataataataatatagtgtgttctttgatcacattggaattaaactaggtatctataatagataaatagaaaatccacaaatgctttacaaccaattaacatacttctaaatagtcaagggtcaaggtagaaattataataaagattagaaaatgcttttaactgaatgataaaatacaacataatccatggacagaaaaattaacacaaaattgcatgtaggactaaacataaaatataaatccataaaatttccaaagaaaacaggagaaaaaaacttcaggatcctagggtaggtaaaaatttcttcaatagaaccaaaaaggtatgacaaaaaaaagaaatgacaaattgatatccatccaaatccaaagcatctgctcttcaaaagacaccactaggaaaatttaaaaggaagttaaagactgacagaagatattcccaacatgtatatatgataaaggacttgtatctaaataaagagcattacaacttaataacaagaccaataacctaattcttaaaatgagcaaaataaacagatgcttcacaatggagagatataaaggccattaagcacatgaaaaatgttcaaaataatcgtcagggaaacgcaaagcaaaatcaccttgaagcactgctgcatatattagaaaagttacaaaataattaaaaaaaaacctggccgggcttggtggctcacgcctgtaatctcagcactttgggaagtcaaggcgggcggatcacgaggtcaggagatcaagatcatcctcgccaacacggtgaaaccccatctgtactaaaaatacaaaaaattagcagggtgtggtggcacgcacctatagtcccagctacttgggaggctgaggcaggagaatcgcttgaacctgggagggggaagttgcagtgagccaagatctcgccactgtgctccactccagcctgggcaacagagcaagactctgtctctcaaaacaaacaaacaaacaaaaacctgacaattcagttggcaaggctgaaagtacctcaaacaatcatacattgttggggggttgtaaaatggtacaaatactttggaaaacaattggcagtttcttataaagttttacatatatttatcatatgaactagcaactccaaacccagaaattgatgcaatataaatgaaaaaaatatatgtctacacaaaaagttgtatatgactgttcatagcagatttattcatcataaccccaaactggaaacaactgtccatcatcgagtgagttaatcagttgtggtcatatattaacataacagtatgctactcagcaataagagaatgaaacactgatacacaccatattaacggatctcaaaactttatgttaagagaaagaaggcagacacagaagagtatgctgtatcattccatttatatgaaagtctagaaaagataattctaatctatactgacaaaaactagatttatgatttcttggagacagaggtgggaagcattgtctgggaaagaatgcaggaaattttgggggtgaggaaaatgttgtttgattgtggtggtggctacacaggtgtataagtttgccaaaacttatcaaaatgtaaagttaaactgggtacaaattgttatatatcatttatgtctcaataaaggtgataaaaatctatttgatacagctaaataggtactttaaagaaacgtatagcgttaaatacaattattagcaaaaaagaattgttgaacattgcttatctaagatttcattccaagaagctagaaaaaaaaccccagaaaatcatatccaaataaaatatttagaagaaaataaaggagcataaattagtgaaaaagaaattagctctataaaagtaggtgggtttttaaaaaaaattaaatgttaagtcctagaaaacctaatcaagaaaacagagtacatacattaccaacaccaggactgaagaagggaacatcactttagatcctaaagatattaaaaatagaacagatattataaactatttaaaaccagtaattagatattttggtgaaattatatggacataatttttaaaagaatttaccaaaatgtacacaagagatataaaatttgattaatcctatgtctatcaaatcattgactacatagctaaaaattttcccaggtgctactctggtaatttttacacacaaaattatggcaaaataataccaaaaccaataataccaatcttacacatcttacccacactcttccagaggaccaaaaacaaacaaaaaaccaaaaacaaaataaagggaatcctcaactcatgttatgagtccataattctgatacaaagtcaaacaaggctattacaagaaagaaaacacagaagacaatatggacatagacataaaatcctatacaaaattttgacaaatttaattcaataatatattaaaaatattacccacaatgaccaaatgaaatctattccaggaatgcaaattgctttaatatctaaaaatcaatttgtatagatgaatcttgaggacattatgctaagggaaataagccagttaccaaaggacaaatactgtatgattctacttatatgaggttatctagatcagtcaaattcatagagacagaaaataggatggtggtttccagggtttagggggtgaagtggggaatggagagtcattgtttaatgggtattcagtttcagctttcttttttattttggagatggagtttcgctctgtcgcccaggctggagtgcagtggtgcgatctgggctcactgcaagctccgcctcccgggttcaggccattctcctgcctcagcctcctgagtagctgggaatacaggcgcccaccaccacgcccggctaattttttgtatttttagcagagatggggtttcaccgtgttagccaggatggtctccatctcctgacctcgtggtctgcccgcctcggcctcccaaagggctaggattacaggcatgagccaccgtgcccagcctcagtttcagctttctaagatgaaacacattctggagatggatagttgcacaatatgacttaatggcactgaactgtacacataatggctaggattataaattctacgtgtattttatgacaattttttaaatgtttaaaatcaaaccacataatttagagtaacagaatgaaaaactataatcatctcaatagtggcaaaaaatgtctgatgaaattcaacacccatcctgataacaaacctcagaaaagtaatttgagtgatagagactatctaaaatttacacctcaagtcataccaaatggtaaaatgttttgttttcctttagattctgggaaaaaggcaaggatgtctacaaatcctatttctggaggtcctagccagtgcaataaagcaagaaaaaagtggtatgaggattataaagaatgatgtaaaactgactttaccacagatgacatactgtgtacacagaaagtcaaaaagaatgaacaattataaataagtgaatttagcaaggtcactggatataagatcaactttaaaaaatctattccatatacatatatatatatatatatatatatatatatatatatatatatgaatgagatataccatatacctatattgtggcaacaatcagaaaatgaaattaaaataatagcatttatacatcaaaaacatcaaatgcatagtactaatctaacaaaacttctacaattgaaaaaatatagtaacttccttttttttttttaaataccttttatttttactcaacttgttaaaggggcagataaagactttggcaaatttgattaacagcacaaaataatgttatccaaactgaataatttattgctggtctgaggcttgccttgtttacactaaagtagaatttacgttgtttccacaaatggcagatatcaacatttaaaggaatttaatagtgacctattcaataaggcaatcatcttggtagcaaacttctatttaaatcttacataactcaagctttataaaaagccaacataattgaaaattgggttctccctctaaagccttaagcattcaaagctcaaaacagttaatttaaaaataagcaaacaaataaaacaacaaaaaaaccctgccagcagatctggctgaaatacttaaaacaaacaaacaaacaaacaaaaactaaatgagcttaatctttacaaaagttatgttagctcaaaagctataaaatcatagttatcttaattctacaaagaagggagagggtcttcatgccaccatttccttaaacctcatctttttcatccaatttggccacatatcaaatttctgtgtgcccctgttttcaagagattcctcttgcagaagagaccaagtataaacatggaagagtaactgcctaagcaggaaagtgttccataatagtgtgcagacaacaagagagttctgagttaatccctggaactcgacctggaccttgatcttgactttgagcgagatctagaacaggatcttgaagtagctctttttggtggaggggacacagagcgggcctttcagggtggaccaggtagcggcgaattggaacgggactggctccttgatctggattttgactttgtatgaccctttccattttctttgggggatccggaccgagacctgcttcgatatttctcatactcatccttagatctgcttcgagaatgtgaatgggagccccgatcagacttgggcttagatttgctctttgatctagatttcctgccttttgatcgagaacgtgatcgacctttgctccgcgacctggaacgggagcgactttttgagacacttccagatctactgcggctgctcctgcgactcctacttcgtgaccatcttctagatcgagacctggatctgcttccagagtaagatcgcctatggcttgtgcgtggcttatcttcaataagcctaatatttctgccatttatttctgtgccatccagtttgtccaaagcacgcttcatgtcagagtaggagcgaaactcaattacaccctcatttgttccttccttgtgggcatccgcacaggttacttaacctgcttgtcgcataaaatcctttaaatctctccaactgcacagactagaaagattttctacaataagcctgtattctgtacgaacaggtggtccgtatttgtctctgccagatgtctccgactgctgtatccacctccaccacggcggcttccgtagctgtagctgtcgcgattgcgacgcgggccccgggcgtgctctacgatcacgcgctcgccgcagagctcctcgctgttcagctcgtaaagggcgtcgtcggtgtcgcgggagtcctcgaactccacgaagccgtagccatttttgaggtctacttcgaggaggcggccatagccactgaaaaagcgctggatggccttctcctggacgttgtagcttaggcgtcctatgtagacgcgcggcatgtccgtggcgggcgggggcccaagggctggttgtggaacggcggaccgcaagccagtagccgcggtgcgggtgcggggacggcaagagcccgaacacgcgcctcacaccatagtggcggccgagtccagccacacaatggttagcaacttctataattgaaaaaattgttgcaaaaatataagaattgctgaaattttgaggttagttcctcaggatccacctgcctcaggtggatcacttgaagtcaggagttcaagaccagcctagccaacatggggaaatcccatctctactaaaaaaaaaatacaaaaaattagccgggtgtggtggcaggcacctgtaaatcccaactactcgggaggctgaggttgcagtgagccgagattgtgccactgcactccaacctgggtgacaaagcaaggatccaactcaaaaacaaacaacaacaaaaccaaatcccaaaatgtttaaagtatctatataaatgaaatgttttggaatactcatagattaaatgtctcaatattcatgtttataacttcacttttccagaattaatctatgtatctgatgtaatgccaacaaaatcctagctttttggtatggggtaattgaaaaaaaaaatcattcaacaatgtatatgaaaatgctaaggacctaaaatagtgacaattttgaacaagaacaaaattagaaaacatacagtttacccttgagcacaagttttaactgtgtgggaccacttatacatggatttacttctacctctgccacttgagacagcaagaccaacccctcgtcgtcttccaccttagcctgctcaacgtgaagacgatgaggataaagatcttgatgatgatccacttctacctaatgaatagtaaatatattttctctcccttattttcttaatcatattttttctctagcttacgtaagagtacagtatctaatacatacacaaaatatgtgttaattgactatattattggtaaggctcctagtcaaacgtaggttattagtagttaagtttttgaggtcaaaagttatacaatgattctttattgtgtaaggggtcagttctcctaacccccgaattgttcaaaggtcaactgtactatcagttttcatttaaaatatttggtattgttacaataataaaagcatacaacgagacatagtccaaaagacactaacatgcatgatcatcggatttatcataaatgttcaactgcaaaacaagggagagagaggaagatggccttttcaataaatgatgttgaacaaattgcttatttgtatgaaaaatattttgacctctactccataccataaatattaatttcagatggatcatacacataaaatagtagatatgtggaagagaatgtagaaaaatatctttatgaccttgagttaggaaaatatttcttaaactgggcaaaaaagcactaatcataaagaaaagttattatcaaaattaagaacttctgttcatcaaaggacatcatttagagagtgaaaaggtaagctgcagatgagatatgtgtaatacaaacatctaaaaaaaccccgtctccagaatatataaagaatcctacaaatgagcaaaaatcagttcccagctaaaaaatggcaaaagtcttgaacaggtacttcccaaagaagatatttaaaaagccaacacatatcgaaaggaggggctcaacagcattatccactgaggaagtgcaaattaaacccataatggaatagcggcatgcacaagaaccaggccctgggagctcaccgtgccactgaaactgctctagtcaggttggtgtgggtcatccccaaccccttccccaatggatacttttcagttcttttgtcatttgaacctgctgaccacattcctcttcttgaggcgtttgcctctaaggcaggaatgggagggagggtttagatgtagtgaggattcggaggcagaatggagggaccaacaaagttggcaccatgcgatgtcaactctgtgacagcagggcttcttaaaggtctgactctcaaacctttcagtcagaaagtggcacattaactatcctcaatgaggattggtctcttagtaatagttaatgtttcactattaaacttcaatcaaaaatggccattttaaccagaatgtcaaattgttcatttatgatggaagataattcacatcagtgtctttcccaatgttaaatacatatttaccctggcatcgtgaaagggtatttgatcctcttatcctccctgaagtgtaactcatcatgccttgttctttttggatgtcaggtctttggtctgttagggccttctggtatcagggacacagcttctgggttcccattgttactctaggcccctcctagcagaagtatttcatagtgttcccagaacttccaagccctcatttatagacttgggagttattggctattttctctctctacacttcatcatgcaaagttcagaagctttacacggcctcttccataaagacacctgttgttgccactgtgaccttttctttggtggcatgttgaaagtggaacttctttctgaggcttgaggtcttctggtctacagcctgggcacaagttccagatattcttgggcacatttttcatctatctggaatttctatcacctcctacaaatgaaactcagtgggtggtaggaataagatgctaagtaactttttttggaatttaggtaacatcagaaccaatttccatgctctaagatgcatgagcacctctccccctcattgtatatccagcactgagggtaggtcctggcacattgaaggtgtccaataaataaaacgcacaacgaaaatatttttccttttaatgtaaatattacaggttcattgcaaggaaaaaattaacttaaaaacacagaaaagaaagtaaaaaacaaaaaattgatgaaccactaaaacagaaataaccatcattaattttttggagaccatcctttcatctctctcaaaagttcacataattacataatattacatttacagttttataccataaaggcagcatttacatttttctgtttttacagtctccccttcccttatctctacttctccttttctcactcccctcaaggtaatcaatattaacagcctggtgtatattcttccatacctgtctccatgtgcatctaaccacacacacacacataaacacaaaataaatgggtgtgattattttaacaaaaatgatatattgtatatatacatttgttataaagcaattatttatcaatacattgtggaaatacattgaaatcagctagcatagatataagtcgtttttaaaattactctcacactgttccataatatgggtatgtcacaatttatctaaccagttccctattaatgggcattcactttgtttgcagttggggctttgcccccctctacaaacagtacttcaacaaacatgtttatttacattcttatgcattgatgctgcttttatttctaacggacagattccaaaagtgagactgctgggtctaagagtatatatgttttaaatttttaaacatatattgttggactgctggtggaagtatgttacacaacctttaagtaatagtacatggtttcccaaaccccaatagctagcaaaagatctcttaatttttgccagatccatgaaggggaagtttcatctcactgagcatttcaatttgcatttccctgagtgctttttaggttcaaaatattttcacaggataatgatcacctacagttgctctcctatgaagaaccatccagtccagagggattaaagacttaagtgtaaaaaataaaatcataaaaatcttaaaaacacatttaggatactacgtataacctagggattaaggagatctcttttaagtaaaatgagtaaaataaaaaatctaaaaaggaaatgatacaaatattttcctataaaaatgttgtgcattactataaagtataaagacaaatgctagattaagaaaaacatctgctacataatgacaaaggattaatatcaaaaatatataaaaagcacctccaggtttataagaaaagacagataaatgaatagaaaaataggcaaatacatatataggcaattaactaaagataatttgttaaatgagtaaagtatgaaatctggatgaacactttcatttgttcattattttcctctagtgagagtttccttataacttctaagatttaatattattaaatgatttcccacataattgcttatagtttctctgtatactttctgataaattcctaatgaagattttcctatattcataaaatatagtttataagattcatcttgtggagttgacatctaggtgaatgacttattgttctttatattaactgagtttctctttgatgtattctttgatgtacagtaaggctcgaactactcctgaaggcttttccacattcattacatttatagggtttttctccagtatgcatcctcaagtgtacagtaaagtctgagttagttctgaaggcttttccacattcttcacatttatagggcctctccccagtatgaattctctgatgtagggttagctgtgatagagtaatacaaccctttccacattccttacaggtgtagggtttttctccagtgtgtgttctccaatgcactgtaaggtaagaacccctcctgaaggcttttccacagacatcacacttatagggcttctctccactatggattttctgatgttctgtgacatgtaccatctggctaaatgctttcccacagtcattacatttaaatggtttctctccagtatgtgttctttgatgtgtattaaagcctgagttacttgtgaaaacctttccacattcattgcatttatagggcttctctccagtatgccttcgttggtgcacggtaagctgtgatgtattagtgaaggctttctcacattcattacatttatatggtttttctccagtatgggtcctctgatgtacaataaggtatgatttagtcctaaaggactttccacagtcataacatttatagggtttcactccagtatgaattttctgatgctccttgagatttaccattttggtgaatgccctctcgcagtcagtacatttatatggtttctctccagtgtgaattctctgatgtacagttaagtgtgattttattctgaaagactccccacattcattgcacagataaggtttctcttcagtatgaatacgctgatgtataattagagaagaagaacgcatgaaggcctttccacattcagtacatttataaggtttctctcctgtatgcattctgtggtgtacagtaaggcatgaataattaatgaatgctttcccacattcattacatttatagggtttttctcctgtgtgaattcgctgatgttctgtgaaatttgcgatgcggttgaatgctttcccacattcattacattcatagggtttttccccagtgtgagttcttatatgtacgataaggcttgaattacttctataggcttttccacattcgttacatctaaaaggtttctctccagtatgaatcctctgatgcacattaaaaattgtggtattcttaaaagacttcccacactcgttgcactgatatggtttctcttcagtgtgggtcttctgatgtacactaagatatgacttgttcctaaaggctttcccacaatcatcacatttgtagggtttctcaccattgtgagtttcctgatgtcttgcaagttttgatttatcactaaaagctttcccgcattcactacatttatagggtttctctccagtttgaattctctggtgctgattaagacgggcacactggctaaaagatttcccacacacattacactgataaggtttctctttagtgtgaattctctgatgtaccataagtgatgaagaagcaatgaaggcctttccacattcattacatttatagggtttttctccagtgtggatttttttgtgctgactgagatatgaaggctggctgaatgttttcccacattcattacattcataaggtttttctttagtatgagttctttgatgttgaatgagcaatgatctataatgaaaggccttttcgcatgtactacatttgtagggtttttccttattattggattttttccccaaagttagttctgaagtctgccttatggctttgctgcctttcatctccttgcaaattatcttccccaaatgggtatctgtaatcaaatttaaattctctgtgaaattttcctcttgtgtttggcatctgctgtgaagctcttctgtggcaatgcctggttctggaataagaatagattcaaatctaaagcctctttgactagtgggagtcttcttgagtggaattattctttgactcaaatgattctcctgattattttgtaatctcaatatcctatcattccatttccataacccttccattctggaatcccacagaccattctctgtaagtttctctagtatggcctcctgtgataaatcttcagaaatagcctttgttcgtgtagccttcttggttgcaggtttgggctccatgtctggggcaaaaaagagaaaaatcaagtaattcctttcctaagctggggcaatctcactaaacagaataataaaagcaataaatacatggataatgaatatatggttttaattgctttcacactgacttgttttttagtgagaagaaggtagggttaagggaggctggtttagcaaaaactaaagtagcaaattcaatgaaactttcccgttaaaaaagtccattcagctgggcacagtggctcatgcctataatctcagcactttgggaggccaaggtgagagaattgcttgagcttaggagttcgagaccagtctgggcaatatagcaaaaccctgtctctacaaaaaaaaaaaaaaaaaaaaaaaaaaaaaaaaaattagccaggcatggtggtgtgcacctgtagtcccagttatttgtgaggctgaggtgggaggactgcttgattctaggaggtggaggttgcagtgagccaagattgtgccactgcattctaccctgggtgacagagcacgactgtctcaaaaaaaaaaaaaaagcccattcatagtttagagccaactattttagatggtattcttcaacttttgacaatctcaaaaactgtcatacttccttgctttctatttactccacaaaccagactttagtccccaatcacactttctatttgttttgttttgttttggagacagatacttgctgtgccacccaggctagagtgcagtggcatgatctcggctcactgcaacctccacctcctgggttcaagcaattctcttgtctcagccttccgagtagccgggactacagtcatgtgccaccacgcccggctcatttttgtatttttagtagagacggggtttcgccatgttggccaggctggtcttgaacttctgacctcaggtgatccacccacctcagcctcccaaagtgctgggattacaggcctgagccaccatgccatgcctggcctctatttgttctcatttttgattgactagctttgttgtgagggctttctcaaattcactggcagagtagtttattcaagtctttgtacataccttttaataaaacttttatggaaaaaaaactttgattttcaaaaagaactgaacaacaaactagtcaaaagttaatatttatacttactgatatttcaaatagtggtaattattgtttaattaagggtagattttgcaacttttttatggccctaagaacatttctgacagtttgtcaaaaattcattaaaaaaattacactgtgggatactggtcttacaatgtgtttgtgtatgcaatttaatattttatttttaagacactttaatgccttttaaaacttgtaattcattttcaggtaattatgcctcaatatttaaatataagttcaataaaaactcttgtccatgatagaatggttttatgatttttttttttttttaatttttgaggcagtgtctcgctctgttgctcaggctggagtacagtggcacaatctcagctcactgcaacctccacctcctgggttcaagtgattcttgtgcttcagcttccgaagtagttgggattacaggcatgcgccaccacatccagctaatttttcttatttttagtagagaaagcattttgctatgttggccaggctggtctccatctcctggcctcaagtgatccaccctcctcggccttccaaagtgctggggtttcaggcgtgagccactgtgcccagccaattttatgattttaaaacccacttttaagcagtatgatttgtctatgttattttacttttataaaatttaaattaatattttgtcatgctgttgctatttatcattcttttacttttaaatagttttaattagtttgagcatattttttgctgtcataggatattatattgccagtatctgataaaaaaaaaagtttgctctcagaaaaaaagctataaggctgggtgtggtggctcatgcctataatcccagcactttgggaggatgagacaggaagactgcttgagcccaggagtttaagaccagcttgggcaacacagtgagaccccatctctataaaaaattaaaaatgagctgggcatagtggcacacacttgtagtactaaatacttggaaggctgaagctggaggatcccctgagcccaggaagttgaggctgcagtgagctatgattgcatcactgcactacagcctgggtgacaaagtgaaaccctgtctcaaataaataaataaataaatgaaggccgggcacagtggctcacgcctgtaatcctagcagtctgggaggccaaggtgggcggattacctgacatcagcagttctagaccagcctggccaacatggtgaaaccccgtctcaactaaacacaaaaattagctgggtgtggtggcacacgcttataatcccagctactcgggaggctgaggcagaagaattgcttgaacccaggaggcggaggttgcagtgagccgagatcacgccactgcactcagcctgggagacaagagagactccatctcaaataaataaataaataaaaaagaagaagaaaagctatataaaacatatctatagcaccaatttggaattcagaaactaatattaaatttaaaaggtcaaaagaatatgaagttggaaagcagaaaaatttgctgcaaaatgcactaaaattataaaagcttagagtacataaaggttgttgttatattagtaattagaaattttcttcaataaatttatttgtagaaacttaatttatatgcactaaattctcatctttcttgagtgaaagtaaaatgttactcccagacaacaagcataaaaaacagaataaaaacttttatatttgagaggtctgcactttggggatgtcagaggaagtcatttggaccaactttattgctgagaacaatttgaaatgttggacaaaagaacagtctgtttgaaagcatctgaaagctagaaagacttaacaaattacaaggagaagaatgaaacccagaaaaacaatcctggtatttggtgccattttccccttcaaatgcctgttaattctctaagaaatgactgagaggctgaataagtaagcagaactcttaataaagtcatagggcaagaaagacagagacggatttaggtccattaaggaggacaattctggaacaactagggtttggctggaaccttaaggtgataagccctacaaatagaacgactaagaaatagatcggctggctgaaggactaaaacccacctcatttaaatttctcattgaattaaagtgaatgaagattgttatagtccctagcctagcagtctggcaaaagcaaacattaatcctctgtgggaaagattacataatctagaacctcctaatattactatagattttcatagtcaatgcctgatacccagtaaaaaataacaggcataaaaggagaccacgctgggcatagtggctcacatcttgtaatcccagcactttgaaaggccaacaagggcagatcacctgaggccaggagttcgagaccagactgggcaacatggcaaaaccccatctctactaaaaaatacaaaaaaattggccaggcatggtggtgcatgcctgtagtcccagctactcaggaggctgaagcaggagaatcacttgaacttgggaggtggaggttgcagtgaactgagattgcgccactgcactccagcctgggtaaaagagcgagactctgtctgcctcccccgaccccaaaaaaaagggagacaaaaatcaaaagtcacatgggaaaaaaatcaagagagaaaacaaatatacagaaacagatctaaaatgaatccaaataattgaggcctcagacataaactttaaaataactaggataactatattcaagaacataagattaacaatctcacaaagatttgtaaagtataaaataaccaaatgaaaattctagaactgaaaaataaatatagtaacttaactcaaactatgggctaagagcacaatagagacagcacatgagagagttagggaaatggaagataggtcagtacaaagtatccatactgaaacacaaaatgatgaaaaacttgcaaacgttagaaaagcagaagagacatccaggatagggtgaaaaggtctatcacagatgtaaccagagtcctagaaggttacaaagagaagtgagagagaatggacagaagctaagtcaaagaaataatgtcttagaattttccacaagagataaaaaaaaaaaatcaagtcacaagtcttagaagccaaatgaatcttcagcatgagaaatatgaagaaaactatattaaagtacacagtagtaaaaccgttgaaaactaaactcttaaaagcagccaaaaaaagagagacagggaagggcacagtggctcacacctgtaatcccagcactttgggaagccaagatgggcagatcccctgaggtcagagttcgagaccagcctggccaatgtggcgagaccccatctctactaaaaatacaaaaattagctgagcgtggtggcaggtgcctgtagtcgcagctactcaggaggctgaggcaggagaattacctgaaaccaggaggcagaggttgcagtgagccgagatcacgtcactgcactccagcctgggcgacagagcgagactccatctcaaaaaaaaaaaaaaaaaaaaaaaaatctgtctctctctctttttttttttaaacagtgtcttgctctgtcacccaggctggagtgcagtggattggattacaagtctgtgccacaacgcccggctaatttttgtatttttagtagagatggggttttgccatgtttcccatgctggtcttgaacgcctgaccccaaatgatccacccacctcagcctcccaacacctggccaaagacagatagatgtcctttaatgagcaacaattagatcagaggttacaaattataaccaatttggcccatcatctgtttctgtatagccagcaagataagaatgatttttatatttatttttatttatttatttacttacttacttacttattttgagaccgagtctcactctgttacccaggctggagtgcagtgggcaatctcagctcattgcaacctccgcctcctgggttcaagtgattcttgtgcctctgccttccgagtagctgggattacaggccagtgccaccatgcctagctaaaatttgtatttttagtagagacggggtttcaccatgttgcccaggctggtctcaaactcctggcctccagtgcctgccttggcctaccaaagtgctgggattacaagcatgagtcaccacgcctggccaatttttacatttaaaatggttgaaaaatatattaaaagaatgtgagacattaaaaatgtatgaaattcaaatttcagagtccataagtgaagttttagtggagcacaaccacattacttggttaatatgttgcctatggattccttggtgctacaatggcagagtggagtagtcacagcagagagtccttatgatccaacaaagccaaaaatattgctgccctgccttttatagaaaagtttagacagatggttcacttctccacagattgtacataagacagaaaacaataaatgatacctttgaaatgttgaaagaatataactgccaatctaaaatttcaaacttaccaaaaatatcctcccaaaatgaaggccaaatgaagatatttttagaaaaaaaaaagagaagaggctgtgcgtggtggctattgcttgtaatcccagcgctttgggaggccgaggtgggtggatcacctgagatcaagagatccagaccaacctagccaacatggtgaaaccccatctctactgaaaatacaaaaattagctgggcatggtggtgcatgcctgtaatcccagctactgaagaggctgagcgagtagaatcgcttgaacctgggaggcagagtttgcagtgagccgagatcacgccattgcactccagcctgggcgacgagagtgaaactcagtctcaaaaaaataaaaaattaacaatatactaccttaaaaataaagacaaaaagtacaagaatacacagaaagtgaaagttagcagatgaaaaaagatatactatacaaataacaaccaaaagaaagatgctgtagtaatattagtatcagacaaaacagattttaaggcaaaaacttttaagaaatgagatacttcataacgacaaaagccaatttaccatacagataacaattataactttgtatttacataataacacagcttcaaatacagaaagaaaaaaattaaatgaactaaataggaagcaaatgtatagtctcactagcagactttaaaaaatctttctcaattgatagaataagctgtaagtatacagattttaacataattaacaaacttaatctcctgacacatctagaaattgtactcaatactcaatacctacctataggctgtacattttttcaagagcacaaaatgtttacaaaattctgcaaagactgacataattcagagcatcctgtctgaccatagtagaattaaagtcaacaagattgctagaaaattcccaaatggcacaaaattaagaaaaacatttaaaaataacccaaggataaaagatatcacaatagaaattataaaatattttccactcaaaaattatgaagatgctacataaaaaagtgtgatatagttctgatagccctaaacaattagaaaagaagaacagctgaaaatcaacgatctaagtacctaattcaagaggttagaaaagatccacaaattaagctctaagaatggaataaaataataaagaacagaaagtaataaaactcaaacatacaagaaaaaggactaaaaacagtaatgtttttaaaagccaagtaatgtcaggcatggtgactcacacctgaaatcccagcaatttgggaggacgaggtgggaggatagcttgagcccaggagttcgagaacagcttggtcaacatagtgagaccccttcctctacaaaaaataaaaatcttaggtgtggtggtgtgtgcctctactcccagctatgtaggaggatgaggcaggaggatcacttgagcccaggagtttgagactgcagtgagctatgatcacaccactgcattccagcctgggtgatagaatgagaccctgtctcaaagaaaaaaaagagtcaagtaagattgataaactctagcaagactgagtaagacaaaataaagaaaacacaaaaaaccagtatcaggaataagaagtggcacatcacttcagatccatacaaacatttaaatgataaaccgatagtatgccaataaattttaaaattagattaaacggaacaatccctaaacataatttgctaaactgaaacaaaaagaaaaaggaaatatgaacagtcctaagtactaaaggcatagaggctataattaaacacttttcccaataaaagcttcaggccaagatggcttccctggtgaattccactaccataaaaaataactttccctctctcacaattttttcttccctcaccataagctaatgatcttgcctcacattttagaaactatggcagctatcataatagtggcctcaatcttcctgccctcaactgacatgcaggtgcacccatcttctccacctttctcagtattacaacacaggaggtgacctctgtacctattcaaggtaaatccccctttcctttctagattttatctcctttaaccctgtcaaacactttagtccttcgtctttgtcttgcaacatcaatgtctctctctccattaaggcaatcctatcagcactcaaacatgtcatagcagctcccatttcaaaaataaaacaagtattttttcttgactccattctttcctttagccactgctccatttctctttccctcttcgtaggggaaaaaaaatccctctctaaaaagttatctaaaactatctctaatgtctacttttcactcactcttttaagtataaataatatctgatatataaaaatacgtaattcatgtgtggattgttcatggcatcataataaaatgaatgcttaaatgaaccagaatctatttctttccatctccactaccatcaccctaatcaaagttactatcatctcctggatagactattgtaacaaccttttaacttactgcctgctttatgcctcaagttcaatctctataaacagggttattttctaaaaaccctgcagtagaatctctccatgctttggaactcacttagatcatctacaaagccctgcacaggcaggctgctacatctctaatcttattctgtaccagtttcccctcactttagtcacagcagcttccttttgatttccagaacacatggcattctctgctgtatcagatcctttgcattgttgttcccttagcctggaatacttctcttttcctcttccccttactgttttcttcttctgacccttcaggtctcggcttaaatgtcacctcttcagaagctcccctgaccaccctgtttgaagcaggtgtcctcatcccaccccagttactctttcttatcctccaatttatctcatagctgggaggtatggcaaccaccattttagtttgtttttatttgtttgccaaattatctatttctcaaaatttaatcttcatgaaggcagggacctggtccattttattagctgctatagcccttgtacctaagccagttcacagtatatagatgtataatattgattaaatacatcaatactatattttgattctcaactgcttccttgtttgtattagcaattagttaaaaacctggaggagaggtggtgggttcctccaaagtttctgtagccttgcaggtgaagaaaactaaataatgagtaaataagtttgccttaagagaaatcagtggggacccttatggaagcattttcaggtaaatgagggaagaaatgtcagataatgaaacaaatgagaaacatgaagttaactggagaagacagacctgaaagggatattttatgcaagtttgaatgaagaagaaataaaataataattacgaaaagcacgtccccaggaaagcagaataggatgagatgtttcccaaaagtggaggacagagagagagggagagagaagatgggggtgagagggacaggcagtgagatgggggatctcttcctctgagacagcgttgaacaaatatatcttcaaaattatttcagatgttctggtgaacatccccctatagtctgttacttcaaataaatcccatcttcttggttctgtttaactcaccaggatagggaattcttgaaatttctctcaccgtcacccatggtcctttcccattctccaaatgagatatcatgtctggtttggaaactgcaagccctgtccagagaaaaataaataggatttgattggagccatgagcaagaactcctgccaaattcagtctcagttcttaatcttctgggcagaatgaccattacaggaagttctagagctgcactgtctgatacagttgccaattgtcacatatggctatttaaatttgaatttaaataaaatcaagtaaaatctaaaattcagttcttcagatggactagccaaatttcaagtgctcaaaagccacaagtgactagtacctgccatattgtacagtgatgttttagacaattacaaagacatctcaaaggaactcaatgctatgattctggtttggtgggataatagattgtggaaataaactgagtttagaaagaaattgaatacatttgtttctttcttctagaggtactgataacttccatttaaggcagtgactagaaaaaactttggtccaaaatctgtggggttgtcaacaatctccaagattccagtgaaatgtgtgtttcttactctacaatgggcagatcatgtagttaagagtgaggaatagcataacccaacaatgtgcccctaaaatcaagtacttcagttaagtactttagaggccctttatctttggcaaacctggtcaaatgggcagatcaatcaacacagaagagaagttatccttacccagggagaccagattcctgtaattctctagcatcacatccttgtgcaggttcctctgtgtagggtccatcaacctccactcctccaatgtgaagtctatagccacatccttaaatgtcaccgattcctaaaacaattacattgtgatcacttagaaactatacaattagacttgttaggcagaattatacataaaaaactggggaagagccccagaaaccagaatcaccaaatgatcatgtaggtcaaccagttcatcctttataggatgtataaatctctccagtgacaagaacttgaaaccataatatgctgcctatatcatcttcagagtttcatctgatagcagaatttcttttcagaccaagtctggcttcctataaattataaatattggctccactatattatctggagtcaaacagcacggtttcctccttccctagaaagtatttaaaatacttgataacagccagcagtttccatccaaatcatctttcttccttaaaaccctggcttatctaaaatatcaattttctttcagttctaatctatagactatgacttactaaaagatacattttatcatttgtattgtggatatagaatattataagctttctctttgaaaaagaaaaataaaaaaaatcgaggaactttgggtaagttctttggtctggatatgtatatgtattaaaaaatggaagaacaggccataaacattttcaatgttacctatcggagaaaagagggagtagagcggactggaatgacagctagactcctttgaatatttgttttgtagacttgacttttgaaccatgtaaatatattataaatgaaataaaaaattaaaaaaaaaatccctgaaaattaagagtaacatgaaaccagctggtagcatactcactcattagagaggaactattttgagtgactttgaaacagtaatttttctgtatacattgcacaagatataccctgagaaaaataactgcaaaataaaaacaaaaccacaatgttttcagtaaataatcatattaattacagtgacagacatgttattgtttaactgctgtgcgtgtagtgcttgataaagcaaattagcatactgacatcattgataactaatatatttggcatgggagaaagaagatagaaatgtaatattgatgagatgaggttaaaaactccatagttctgagtttgaataggaagtatcactagagattcatgaagcattttaagagaaaaaaaaaaaaaaacacatttcctagcttcagccactgaaaaggcccagaaaccataaccaataaggtggcactatgcaagccagactgtgggctctaaatattacttccccctaaaaggaaccagggcctagaataccctgacatattaaaaagcaaggaagctatgaaagactactagggtcatatctaagacacaggagacaacttgaagaggcttccactggccaatgatatgacaatttgagcatcaataaggataataactgcaatggatttcaaaagcatctaatacagttacattcatgatacattattttaaaaatctcatctattatctttggagaatacctggaaactggtaagtaaagagaaagaatcaaacttttgtcctttcttacctatgcaaagtacatatagtttgtattgtaatcaaacataattaaatagttgctgagggaaggtttctctttatggaagtattttagctaatgaatgaagaaggaacaaaagaattagaacatcacaatttgcaactactaatgaattaaagaatcatcagcagctgctaacataaaagaaaggcctcagttagctagtatatgtcttctagtggtatataccagcaatatgcaatgacattgctgaaaatattttaaaaatcaaaaatctcagggccgggcgccgtggctcatgcctgtaatcccagcactttaggaggccaaggcgggcggatcacgaggtcaggagatcgagaccattctggctaacacggtgaaaccccatctcaactaaaaatacaaaaaattagccgggtgtggtggcgggtgcctgtagtcccagctactagggaggctgaggcaggagaatggcatgaacctgggaggcggagcttgcagtgagccgagattgcgccactgcactccagcctggtacacgaagagagactccgtctcaaaaaaaaaaaaaatcaaaatctcagccgggtgcagtgttgaataggagtggtgagagagggcatccctgtcttgtgccagttttcaaagggaatgtttccagtttttgctggttcaacatgtgcaaatcaataaatgtaatccagcatataaacagaaccaacatagtgttggaagttctggccagggcaattaggcaggagaaggaaataaaaatcactagcattcttatacaccaataacagacaaacagagaaccaaatcatgagtgaactcacattcacaattgtttcaaagagaataaaatacctaggaatccaacttacaagggatgtgaaggacctcttcaaggagaactacaaaccactgctcaatgaaataaaagagatacaaatggaagaacattccatgctcatgggtaggaagaaccaatatcgtgaaaatggccatactgcccaaggtaatttatagattcaacgccacccccatcaagctaccaatgactttcttcacagaattggaaaaaactactttaaagttcatatggagccaaaaaagagcccacatcgctaagtcaatcctaagccaaaagaacaaagctggaggcatcgcgctacctgacttcaaactatactacaaggctacagtaaccaaaacagcatggtactggtaccaaaacagagatatagatcaatggaacagaacagagccctcagaaataatgccacatatctacaaccatctgatctttgacaaacctgacaaaaacaagaaatggggaaaggattccatatttaaaaaatggtgctcggaaaactggctggccatatgtagaaagctgaaactggatcccttccttacaccttatacaaaaattaattcaagatggattaaagacttacatgttaggcttaaaaccatgaaaaccctagaagaaaacctaggcaataccattcaggacataggcatgggcaaggacttcatgtctaaaacaccaaaagcaatggcaacaaaagccaaaattgacaaatgggatctaattcaactaaagagcttctgcacagcaaaagaaactaccatcagagtgaacaggcaacctacaaaatgggagaaaatttttgcaacctactcatctgacaaagggctaatatccagaatctacaatgaactcaaacaaatttacaagaaaaaaacaaccccatcaaaaggtgggcaaaggatatgaacagacacttctcaaaagaagacatttatgcagccaaaaaacacatgaaaaaatgctcatcatcactggccatcagagaaatgcaaatcaaaaccacaatgagataccatctcacaccagttaggatggcgatcattaaaaagtcaggaaacaacaggtgctggagaggatgtggagaaataggaacacttttacactgttggtgggaccggaaactagttcaaccattgtggaagtcagtgtggcgattcctcagggatctagaactagaaataccatttgacccagccatcccatgactgggtatatacccaaaggattataaatcatgctgctgtaaagacacatgcacacgtatgtttactgcggcactactcacaatagcagacttggaaccaacccaaatgtccaacaacgatagactggattaagaaaatgtggcacatatacaccatggaatactatgcagccataaaaaatgaagagttcatgtcctttgtagggacatggatgaaactggaaaccatcattctcagcaaactatcgcaaggacaaaaaaccaaacactgaatgttctcactcataggtgggaattgaacaatgagaacacatggacacaggaaggggaacatcacactccgggggactgttgtggggttgggggagggatagcattaggagatatgcctaatgctaaatgacgacttaatgggtgcagcacaccaacatggcacatgtatacatatgtaacaaacctgcacatcgtgcacatgtaccctaaaacttaaagtataacaataataaaataaaataaaaagagggggaacaggtttaagggatgtaaactactctccccacttctgtgagtataatgcttattatgtatcagagactgctctaagggcttataatgtactgaatgaatcatcacaataaggaaggtgctatttacaaataaggaaagtgaggcacagagatgttagatgtcttgcccaaagtcaaagaagcagaagaatctagattcaaatccaagcagtctatattgagaattccagcttgtaaccttgtaatcattctgatccatgatctagtaaactaagagccctgattagctgactactcaggcaaagaagtcaacttagatcatatttggctaaggtctgttctggatcagaagaaagatttcctctggggtgtttttctaccatttagatatgtatgcttgtcatacatgtcttatgtatatatatatccctttgtagttttgaacctttaggtttttgaagcttgttttagataattctgctaataataagacatggcgaatgtaggacatgttgagttcataaactttattgttaatcacttgacatgtgtctgtaaccaatgtactgggttttgttttctttcttcaccaagaactcagccccaggaaaaaatctgagaaggccctcatctctcatctatagcttaccttgaggctctgtacaagcaagaaatgactaaggcagagttgcaacctgcctgcctaagagggaaatgtatgcccaacacatacaaaggcccctttggcagtcgctgaagacttactggtttaaggcaaaaagaaatctgtctaatcattaactatcaccatgttaaccaagcagatattttagtggctatacatgataaagaatacagactttacagattggtccaggaaagtttctaaacaaagcaacagcaccagcaacaactgcaacaacaaaccccagagaggggagaatctgatttccagagttgccacattatattatttaaaataactagctggttttcaacaaaaaattataagacacacaaagaaacacgaaagcatggacccatacacagtaaaaaataaagcatcaatggaaattacctccgaggaagtcaagacattgtacttattaaacaaagacattaaggcagctattataaatatgttcaaagacctaaagaaaaccatgtataaagatttaaaagaaattgtgagaatgatatttcactaaatagaaattttagagttgaaaagtataataactgaaataaatgtaccagtgagacataacaaatttaaacatatactcacctaacaaaagagtcccataagacaagaagtaaaaatttataaaattgaaggggcaaagagataattcaacggtagtagctggacaaagtgaaaacagtgctcagagggaaatttatagctataaaatgcctacaatttaaaaagaagaaatcagtaacctaaatttataccttaaggaactagagaaggaagagtgaactaaattttttaggaagctgaaggaagaaaataataaatattagaatggaaataaaatagagaacagaaaaacagcagaggaaataaaaaagggcaaaaattggttatttggaaagataaaaaaatggcaaacccttagctagagtgactaagaaaaaaaagagagaagacacaaattactaaaatcagaatgaaaaagaagacattcctactgaccttaaagaaataagaggattataaaggaacactatgaaccatggtatgcgaacttagatgaaatggacaaattcgtagaaaggcattaactaccaaaactgactcagtgtacagaaaatctggatagatctataacaagtacacttcccacaaagaaaagcctaggttcaaatggtttcatgtgaattataccaaacatttcaagaagaattaataccaatccttcactaactcttccaaaaaatggaagggaaaaattccaaacccactttatgagaccaatattaccaaaactagacaaagacctcagaagaacaccacagaccagcatccttatgaatatggacacaaaattctcaacaaaatactaacaaagtggattcagcaacaactaaaatgccacatatactacagccaaatgggaattatcttaggaatacaaggtttatgtaatatcaaaaaaatcaatcaatagaacaaagaacaacaactgcacatcatcttaatagattcaaatatgtatttgacaaaattcaacaaactaaaaatagaagcaaacatcatcaacctgataaagactctctatgaaaacctacatctagcctcatacttaatggtaaacagctgaatgcattcttcctgagatcacaaagacaacaatgtcccttctcacttttctttttctttctttctctctctctctctttttttttggatacaggatcttgctcatcgcccaggctggagtacagtggtgcaattttggctcattgcaacctccacctccccagttcaagggatcctcccgtctcagcatcccaagtagccgggattacaggtgtgtgccaccatgcctggctaatttttgtattttttagtagagacagggtttcaccatgttggccaggctagtctcgaactcctggcctcaagtgatccacccacctcagcctcctaaagtgctgggattacaggcatgggccaccatgcccagacattccttctcacttctattcaacattatatcgtacattttgcaagggaaatttgaaaaggaaaagaaatacaaggtacccagacaggaaaggagaaagcaaattttgatttgcaaatgatataatctctctatacagttaatgttatcttgcatataaaaccctaataaatccacatatacacaaacaatttagttctattagaataacctagttcagcaaggttcaggatacaagatctatatgtgtgtgtttaagtcaattatctgtatacactatcaataactatttcaaaaggaaattaagaaaaaattcatttataatagcaaaaataagaaaacacaggaatgaagttttaacaaaagatgtgtaaaacatgcacactgaaaactataaaactacaaaactgaaagaaactaaagaatacataaataaatgggaggacaatcgatgttcaagtatggaagacttaatcttgcgaatatagcattactctccaaattgatcaacagattcaacataagacttataaaaattccatctggctttttttttcctgaaatggaaaagctgatcctaaaattcatttggaagtgaatttgtttttttaaaacaatactgaaaaagaagaaaggtgaggcactcatacctcctaatttcaaaacgtacttcaaaggtatttccaaaacttagttcaaagctacagtgctcaagacagtatggtactgacattaggatagacatttacatcaatggaatagaactgacagtctaggaataaatccctacattaatggtcagttgatttttaataagggtactaagacaatgagtagagaatagtcttttcaacaaacagtgctgagacaactgaatattcacatgccaaagaatgaagctgaatctctacctcagaccataaacaaaacttaactcaaaatggactatagacctaaatgtaagaactaaactataaaactgttagaaggaaagacagaggaacatcttcatgacctccgatttggtaatgaattattagatatgacaccaaaagcacactagacaaaagacaagaagagatcattaggacttcattaaaattaaaaacttctgtgcttcaaaggacatcatcaaaaactcaaaaagccaaccgaagaatgtaagaaaatatttacaaaccatttatctgaaaagggatttgtatttagaacatataaagaacccttacaagtcaaacataaaaggacaaataacccaataaaaaatgggcaaaggacttgaatagatatttctccaaaggagatatacaagtggccaataagtatgctcaagagaagatgctggaagttcttagtaattagggaaataaagtctctaagatacagtaagctaccacttcacacccaataagatgtgtataatcaaaaaagccagacaatatcaagcgttgttgaagaagtagagcaactgcaacactcatacgttgctggtgggaatgtaatatggggcagctgctttgtaaaacaatctgacagttctccaaatggtttaacatagaattatcatatgatccagcaaaattccaaccctaggtatataccaagagaaatgaaaacacatgctcacacaaaaacgtatacacaaatgtattagcatcattattaattgccccaaagtggaaacaactcaaatactcatcaactgacaaacggataagtgatatggataagctatatccatacaactggaatattatttggccataaaaaggaataaagtactgacacatgctacaacacacataaaccttgaaaatattatgctaaaatgaaagcagtcaccaaggacaacatattatatcatttcatttatatgaaatgtccagaataggcaaatctatacagatgaaaagattagtggttgtcagaggctgtaaggagggggaatggagagtactgctagtgggtatggggtttctttttcagggtgatggaatgttctgtaattccatacagtgatggttacaaactctgtgaatatatttaaaaaccactgaaatgtatactttatgaattttatgatatattaattacatcttagtaaagtgtcattaaaaatactgccagaaggacaatctttttcttccctcccaggggaaaatcaggtaaataaataatcataaaaaatcaaaggtttgtgttgtgtgaagaacgaatgaaaaattgattgtagaatgtagaagtgtgagttaactttgaaacataaaactgctgcgacagtttggatgccttcccccaaaacctcatgttcaaaactgatccccatgttggagatggggcctaatgggaggtgtttgtgtcatggggctggatccctcatgaatgccttggtgccatcctcatggtaatgagtgagttctccctctattattagtagttcccatgaaagctggctgttaaaaagagcatggcccctcccctctccctctcttgctatgtagtctctatacacactgtctctctttccttttcactgtgaatggaagcagcctgaggccctcacaagatgcagatactggcagtatgcttcttgtacaaactgcagaactgtgagccaaataaaccccttttctttataaattacccactcttgggtatgcctttatatggcaacaaacacactaaaacaacttctaagaatgttgagggcattttgatcttgtgaaagtaaattcacttaagtatcctttattcagaaactgaactttgtcaaactgaagaaactattactataactaaagttttatttttattgcaaaaagttcctagggagctaaaagagtacccatttatttcaaatttcaccatcccagaccaactctattcataatttagacaaataaaattggaaacctaatatataatacccaaaaattgttgattctaagataatacactgatgcatacaatggaaaccagaaatcataagcctcatattctctacctcaaagacactgggcaaataacattaagccagactgatgtaaaagtttctttttgatagagttcgagaaagtaaaaattagcttatactgagaaagtaaaattctgcccttccacacctcaagctagaatagagatacagataaaaccaactgacaagttaacggcaaacaatatttcttctaaagtcattctgcagctgtaaaatgtcataattacccgttttgagcaactactgctttcttactcattagacacctcatcttttaaagtcatagactgtcagaaattgtgtagtctgaaatcacatcagaaagaatgaaagtgactttgatgctgagaagcagttatttgcaacccagatgcagactttcacatgaggggtttctgaatatgtcattttacatttaactttgtattttccaaggaaataggactccagatccattatgcagtctggacatggtattgactcttttatacagagcctattttgctgtaagcctatcacatccctgatctcattaaaatttcatcagaattccctccttcgtcaagattatataataacccagctgggtgccatggctcatgcctgtaatcccagcactttgggaggctgaggtgggcagatcacttgagttcaggagttgaagaccagtctggccaacacggtgaaaccccgtacactaaaaatacaaaaattagccggacatggtggtgggtgcctagtcccggttactgggaggcttttaaaggcttattatctcctcttcatcttgaggctatgcttatctagttgtttgttgttggtaaattaagttgtttaccaaaagttacaacatatatactggcactatgatactcagaaaatatcaagactctttgtcttgatgtgttccttttggtctgattataataatcatgcaataagagttcttcatcaatcttctatagtttctttgttagacgtttgtactaaaaaacatgtacctgtaaaataaaagacatttagcactgaaatttcttcttttaaaggactacgctacaaaaaaaaaaaaaacaaaacactaattgaaaatgtcagccgggcgcagtggctcatgcctgtaatcccagcattttgggaggctgaggcaggcaggtcacctgaggtcaggagttcaagaccagtctgactgacatggtaaaaccccatctatactgaaaatacaaaaattagccgcccgtggtagtaggtccctgtaatcccggctactcgggaggctgaggcaggagaatcgcttgtacccgggaggcagaggttgcagtgagccaagattgtgccactgtgcctgggtgacagagcgagactccatctcaaaaaaaaaaaaaaaaaaaagaaaatgtcagcaatagttataagaaaatcaagcaaatacaaaaccaattaaattaaattaataacttattgatagttattatcaaatcactggttctattaaaagtaaaattaaactaagctatgtttagtatgtataataaaaaggatgcagaatttagggaagagccagacagaattaatcttctaccagggactccctttgtcagaacaaaaataaaccatatgaattgtacaccatgtcaaaaagtatggcattttctaaggtttatggttcaaagtctaaaactatgaatatttctactctaagtttttaagaatctaagctatcgtatgttaaaaagaatttaaaaaatcatttcaaaaatactatgtataaaactgaatctcagaatgtattttctcatagaagcaaaagtaaaaaccacattttacaaaaaacatctctggaataaaaccaactttcaaaggataattttaaaaaacttaaaaacataattcttctaaaagcatagtgaatacttgccaaagatttacataagtcattaatgagggatcagaagcttgacaagacaggtttaaaggagatgcaagaaaccgatgtacagatagtggaaaaaagaatgctggaataagactgcaaaattggatacaaacctggttaatgtcctacaggacagtaataccataactttggggattatcttttatcctagcaaaaataattgcaatgtttcaatcttctacaagttaatatctaacttttaggatctaaatattaattaatagtaaatggtaagtcaaacaacataaccctcccctgctatgtcagataacccttagacaggcttgttaagacaatggtctaatatgactctgaaatggcctacatttatcttttatttatttctaagttttggataatttttcttatcacaacaaatttctgatttttattttttctggaaaaatgaagtggattcactactcacatataagaaatcctgaagaaataaaatatctaaaccaatttaaactcatcttaacactatttccacaatgttgatgtactcttggtattttttaatggcacagtattgggtcttacaatgcagcacaagcttcagactacgtaatgataggatattttaccattagtaatcacgatgtgactatctggctagattacggctgccacctctgagagaaatgaaatctgttaaattgatgccaccagccctggggctaccacaccaatcaaataatcattgtgaacttgcaattaactgggaacattgagaatcagaggcagtaaaataggcattttctctgtattcattatatgtacaacagtaggtattacctttaccaattgtgtttcttctgcctgaaggtgaagatcttcatctggctgggtaacttcagggctctgatgggatacaggataagatcattcagtgataggctgcctatgacttacagcagagcctcaacaagcaccaccaatccactgtggatgcagtgtatacaggatgacctcacctactgttttacttagggctgaaatcaaagtcccattgtaacatgcaatcataatctttcactttgtttgggacaatgacaaacacacgtaagattgaaaaagatataactgcttttaaaaaagaacctatcaaaacaaaaataaacttataataaagtgccttcagacactacataattctactttttcatattgggatgaaatctatttctcagaaagtatctatcttgctcaagaataacactcaaaacctactaacactatctgttttctacaattgaaaaatcattacagtgtttggtggggggatgtggctcaacagtcactcaggaaatatttcagcaacctctcataacattgttttcttccaaaacttagaaactgtatctccatgagggccttatttatttatttatttttatttttattttttattttttttgagacagagtcttactctgtcgctgcccaggctggagtgcagtggggcgatcttggctcactgcaacctctgcctcccaggttcaagtgattctcctgtctcagcctcctgagtagctgggactataggcacacaccaccatgtccggctaattttttgtactcttttttttttgtggagacagagtttcaccatgttgcccaggctggtcttgaactcctgggctcagataatctgcccacctcagcctcccaaagtgctaggattgcaggcatgagccactgcgcccagcccatgagggcctgattttatgaatgcaatgaaattttactttaccttctagttgtagttatccatttcagatgctgtgccatttaaaaaaattatggataataaaactacataaagatcactatgaaaaaatgttatgctaactctccctcaacaacatcttgtctaaaaatgcacaaatattcagattccagaaaattaatgatgatgtgaatcttctatctctgatagagacgggttgatcccgtgatacacgattagacaaatatggttatacctggtgatcaagggcaacattttggttttatttatcttttcaagggtattttaaaggactatttacatgttacatattctggctacaaagaataaaagaccacaatcacgggttattacagatcattactataacaaattatatttgttggtattctctttcttctgaatctattttaaagtcactgctaaaacacagcttttatcacattaataataatcccaaggacactcaaacacacacacacacacatttaaatgtcttcagggaaacattaaaagattcatcttaaatatctaacttccagccctatctgtcacaactttccaacttgaatcacaagctcacccactgttctctgcctctgaagccttgcccttaaacccgtttctcacctgaactatcttcataaatactttatgacaattaaaatctcacttgtaattcagtaccagcttaaatctaactatccttatgaactttctatgaccagtttagcccacactatcatcccatttctttctttacatagcactcatctttatcataccgataagcaactactgttcacccaaataatgtaattattacttttgtacattttacctcaatgaaactgtaaattccctagagccaagcactgtcttaaacatattctctcaatgtaatctattaaatctaatcacttcttaatgagtagaaaagagatcactgagagtggcacaaggggaatggttcctgtgaatcagggctggggtatgtgtttgtgtacatatattttccccataatttcctatataaaattttccaattgaaaaatattccattttgctgtcccacaaataactaaaatttcctgggaacaatacaaatttaatatcaaaattaaagatgcctgtcataactaacgacagctcagatattttttgaaagatcatgtgtcctgatatttggttaagtaagtatagtgaatcgtcccatagtttactacccttactgtgaacccaattttcatgggtctatttagttgagttcccagaaggggtgtcgggggaagtagagaagtcgcaagccttcaggcaaagtaaacatgctctcaaaccaagatagtaggtcaaaaacagggaatcccaacttaccaggcgtccaactgagaaaaacacagcagccataatctctccctctggtttcccctctctggaaagagtggagtcttgcaaagacatacctaaggaagagaaataagccatggaaaccaatcctgcctggggaatttcagactcaccaagttggaatcctgacatacaagtgagcatgacctccctaaggaagcacaagagtaacccttaagatcagtgagggacaaagacccttgctccggcagagctcaagattttagcactgttaactatagtcacaactaacaggctagccattgtacaaggaggttttaaaatactttctcattttattttcacatcaacctagtaggaataatattcccattccatagatgaggaaactgaacctaaaaaaattaaagtacccaaggccatgcagatacatgaccccaaatcaatctaattccaaagcccataccttttccactgaatcaacatgctgtgtgaagtacgaaaaaaaatacttcagtctttctttgccacaatcacttactcatctaacaattaaatattctaagaatctccttttcttgcctttcccacgaagagtctatttcctaacattttcagagatctgtttcatgtaaagagaacactacgacttcaaaatttaaatgatattggaaatcttgatttacccctccgaatctgatattcaaatagatctttatcctttctatatcaggcaaacttaaacaaaaaggaagcaggtataataataataataataataataatagaagagacatgaaattcagtgcacaaagcattaagctatagtctttttatattgaaaaaaaagtatatacctaataaaagttttatcctatggagcaacagggtggcagagatcttttccagggatgcttgggccctgcttttctacctttggctaatgatatgtatggccttgctgaggctgagtttggttcaagaaccaggagtgcctgatgtaggatatcaaacagtacagattgtcaatataaattcttctaggatggtaatactagcctcatgaatctttattcatgagggcagtgacataataagtattaagtttttgtacaaaaagtgttataagcaattatatggtcctgcaagtagggcctttgttatgcttaaacatgtggaatctgctccttccctgaatgtgcaccttgcttctcataacgttcagtagctttgctcaataaacatagcagaacttaatctaaccttacagtgtctaacaatcagaagctcatctgaaaagatacttgaagtacttaaccattattctctgaaaaacaagaatatataaagcaaggttatcaagaatgcaaagaatattagagatataaaaattaactagatatgggtatactgaaacatatactgtcagattaatgtattaactcaaggaggagaccagggttagttaaatcaagaaaatatgtaaatatcttggctgggcatggtggctcatacctgtaatcccagcactttgggaggccgaggcgggcagagcacctgaggtcaggagtttgagaccagcctggctgacacggtgaaaccctgactctactaaaaaatacaaaatgatcagccaggtgtggtggtgcacgcctgtagtcccagctactcgggaggctgaggcactagaattgcttgaacttgggaggtggaggttgcagtgagcagagattgtgtcactgcactcctgcctgggcgacacagcgagactccatctcaaaaaaaaaaaaaaaaagtgagtatcttaaaaatgtagagtgacctgtttcatgacactggggctttcctaggcacaatgaaaaggttttggtggaagagaaacaatgagaagttgagggaggaaagcggtacagtgtggagataaaagaggtaaagaaagaatagtctgaggggattcctgtattgaagcctcaaggtaaccagtaagtggttttgccttatgccagtgtttctctagatttttctgtcatagagccttttgcaaatctaatgaaaattatgactcctctcctgttttctaatgaaaacgccacatgtataactagaggggtctcaaatctgagaatgcaaaaaactcactggatatgcttattaaaaaggaaattatttggccccatccaagatcaaaatcaggatctctagatgtgaggcacagaaatatacagcttgaacaagtacaccttaagaaatatttagtttaatataatgttaacatgttaattatataatgttaaattatataatgttttagttttagtgtaatattttaagaaatattgcctgttacacaatagggattctgaagggtgaaggagtgggaggggggtggagaataaggaattacttaatgggtataatgtacgttattctagggacagataccctgaaagccctgatctcaccactacacaatctatgcataccagtaaatcttaatttttgggggggtacggacccatctgagaatctgaccttgtccacaaaataatgcacatgcatatatgatgttgcatattacttcagagagcttgaaaactgactctccctcccaagcccatacactgacccccaagttttacaaggttgcaaagaaaaaaaatgagccaagaatattgccccatcccgcaacccccgaacactaaagcagacctacaaagagcaacataaggcattttcaattccgaaggtctagagtaatggttttctgcatctttaacatttatcaagagtgagctgagtcatcatttttaaaatatttgtaaatattaataaactctttggcaatactttatgtagattatgtagattatgctcgtaacatatgtttaacaaccaaactacaataaatcccttgttttattttataattagaataaacaatatttaacatttaatatattcagcttgatctcaattgtgcaaatgtaatgcatagaaaaaaagactgagtaacccaaaactctactgagacctctgagacctggggctgtgatgtttacccttctttctgcttttctgtactctccaagcagacaagaagaagtatctacctatacataggagtgtggaataggaataaaatcccagagtggctggccacatccccaggttctaaccctgctttggctaccgtaaaactgtgaccacaggcaagtcacttgagcacaacgaatcagctattagtacatgacagtagccaccttatatgtttctactgtcccctttgtcattatgcagaagatatctaggccactattccccagttataatttccctatttacaagctctgtctttccaactattgcaaacgtatccagagacttaaggagaaactttacttgttttgcttccttggccagtgcagttatttagaaataatgaagggtccatgtttttgctgagaatctcagcgccatgtaccagtccagcatttcccaaccaatgcaataataccattgtcatgtcagggagtgacaagtgattaaaaggtgattacagtatttgaaatgtgacatttcaggaaaagctgcctcggttactgagtagcgcaggtcccccgatgtggaacctagttccatccctgccagttcagaagccagagcggatatgctcctgccaacctcgccttctttccctaactgctctcctctacccacttcgggtatgccctcctcagggcctgcaaggcgcggggctgggaagaccgggaaagtcgggtcaggggcccgcccgccctactcgactccctgcgccctgcgcccggctctttttaaccccagcgccgccaggcccgcagggagggggttcccgggtttggacccggactaggaggccgcatagggcacgcggccctacctgtgagggaggccagctggagactgaacccacactcgggaaggaggcccagccccaatcgcctctcaggagtgggcgggtccgctcagggacaggggctctagagggaacggccacgccccggacgccgccgggagccaagcgccaagggaggggcggcgggcaaccgaggccaggcgcccgggacaacgagtacctggcggccgaactgaggacaactgagggaactcgcagagcagggcgggaacgcttccagcaatggcggcggctcggcggtgccggcctccaggcagggcattgcgcctgcgcagccggagcgtcggaactacagtgcccagaatcctcagcgcctgagccccccgccccttttgtctgcgttagtgaaggaattggctcttcgagggtgagaaaaaattccaattggatacacttctgttgagaagccttgactatgtgtcaaaagcaatagcactagagatacaaataatgacacaacccttgtcttggaacatttaggtgcgactaaagaaagccgtcgagagaacagatagatgtgatccagacaaatatgtgaacaagtgcttggaaacacatatttctgaacaattccctttatgacaattccctcagagttggaagagacaacaattgatgactataatgccaattaagtagaatggatatgaatgtctgaaaataagctggaaattttaaggccaaaattcttcgaaatacaaagaaaaaacctttctgaagacaaatagctgtagaagttctcctcaatgcatacaaatgataattcttaaaacacaatgactgaaagtatttatttgcaacaaatttatttgaccacttattcaagggctgctcgtccaagagctatattaaggtctatttactttatccctaccaaaggcggtattttttgaggatagaaactacatctcatggagtttatcactcagagtgcctacttaggagactgcttgcatactgaatgaaacgaaggaagaatgaatgaataatttgggaccccacctcccaacacacttccacatatcgaaatgcacacggaatgaggtacatcttctaaggagagtggcattgaagagtaatcaaaacaacaggatattcacaggaggactggaataaaacgaaatttccagtgaaaaagattactcaaaatatttattcaatacactctgaaattagaaactaagcaaatgtcttttggagatcccagttccctcacattccccacagatgaagatgagccaaacagaagtccaaaacttaaacattacaaaacaaataataaaataagacactgtgactgaaaatcagcacaaacaataaacggcagaaatatatcccccaaaacttcagaggcagagctcatttgattaaaaatttaaaattattacatttaaaatgtttaaggacatgatagatggaattaaaaacattatcaacaaacaacagaatgtaaaataagccaccaggaaagtttagagaaacatacacatttcgttaaactattaaaaaaaaatgtttaacacaatatttagggtagattattacttctacagggataaagtccaggaaagacagacacacaggtgacttcaaaggtattggtagtgttttatttcttaattttggtaggagtacactgttcaatttgtagtgatatttgttataggcaattttgtgtgcattttatatttagtaatttttaaactcttaaagaactcttctgtgaaggaagaaactaatgctttttggcttcaaataataaaccaatggttaaaagttacttgaagatagattttgattcagattgtataactttatgctaacaacgaacagctttagaaaatagagtaggctaccttgtgcaataatgaatttgaattctttggagaagttcaggcagagattagatgaatccttgcttagaatttttaaatgtcctcttgggaatttgattgcatgacctgcaagctctcttccacataagcattttgtgtttacatgaatattcctttcattacatttatttttcctcccattgggccaggtaatgaatagatttgtatcatcataatgtgttatggaatacttaggaatcagtgacattaagggatgacttcgtctgggaagagtggaacttaatggattcctcaaaaggactctgcacaagggtgtgatattgggaaactacaggaacctggtctctctgggtaagaagagttttgttgtgactcgctatttttctgttggaccaaatggaccttaggattcagggatttatgatatcttatgaacccttatggagtagttctatctccatttccaagtaaaaactctactctttgtaaagggaaaaatttatattttcatcagcatatcttgaaaactctacctgaggacaatcccccagacctaggactgtctcttttaaagtctcttttcaggtacttcaattctgcctttttaaaaaaattagaaaaatatatatttttggctaacttatattggttctgtgatgcagcatattttaccattcttgggagcacatatttgacccctcccaactacctttgtaatcatatggaactccctatattgatcatgccttccaaaagattatgtccacatagaactccggaatggctttttgtcaccaacatagtgaagttctatttcccttttcccgaacagggcttgcagttcccaaaccagacacaatctcccagttagagaaagaaaaaggatcctagatgatagtgagacaaatttcaggaaactccatccaaataagtaaatgagaatgaggataagattcattgtaagtaacatcctcagttggtgttcaaaagttatcttttgcctgggtacagtggctcacacctgtaatccgagtgctttgggagcccaaggtgggaggattgctagaaaccaacagtttgagaccagcttgagcaatatagtgagaccccatctcttaaaaaaaatttaaaaatttaccaggcatggtggcatttgcctgtagtcccagctactcagaggctgaggtgggaggatcgcttgaacccaggagttcaaggctgcagtgggtgaggattgcaacactgaattccagcctaggtgacagaacgagaccctgtctctctaaaaaacaagcaaacaaaccaaccaaaaaccacgaacaaaccaaacccctgccgggcgcggtggctcacgcctgtaatcccagcactttgggaggccgaggcaggtggatcacgaggtcaggagatcgagaccatcctggctaacaaggtgaaaccccgtctctactaaaaatacaaaaaaaaaaattagccgggcacggtggcaggcgcctgtagtcccagctactcgggaggctgaggcaggagaatggcgtgaacccgggaagcagagcttgcagtgagccgagattgcgccactgcagtccgcagtccggcctgggcgacagagcgagactccgtctcaaaaaaaaaaaaaaaaaaaaaaaaaaccaaaccccttttagcaaaatacctgcatgaggtaataaaacttatgtatcaaatgcctacaacaaacatatgtcatgatgaaatgttaaatgttaaatgcttcccatagaattaggttcaagatgagtttccatccaccatcacatttcattttcacattgcagaatgtaaaggggcctgcccaagatcataacattgctcactgggtaagtcaagagaacccagtacagcactttagatccttcattttagttttgttctaaaactgctcctgttaccctttggacatgagtcttttatgtattatcatttgaattcatgtatattagttcattttcgcactgctctaaagaatgcctgagactgggtgatttataaacaaaagaggtttaattggctcacagttttgcatggctgggaaggcctcaggaaacttacaatcatgatggaaggcaaagaggaagcaggtaatttattcacaaggcagcgggagagaggggagagcaggggaaactgccacttataaaatcatcagacctcatgaaaactcactgtcatgagaacagcatggggcaaaccaccctcatgatccaatcacctcccaccaggtccctccctcgacacatggggattaaaattcaagatgagatttgggtggggacacagagccaaaccatatcattctgctgctgggccctcctaaatctcaagcccttttcacatttcaaaaccaattatgccttcccaatagtcccccaaagtcttaactcattccagcattaacccaaaatccaagttcaaagtcttatttgagacaaggcaagtcccttccatctatgagcctgtaaaatcaaaagcaagttagtgacttccaagatacaatgcgggtacaggcattgggtaaatgttcccattccaaacaggaaaaattggccaaaacaaagggaccaacaggcctcatgtaagtccagaatctggtaggggagtcattaaatcttaaagctccaacgtgatcttctttgactccatatctcacatccagggcattctgatgtgggctcccaaggccttgggcagctccgcccctgtggcactgctgggtatagcccctttggctgtttttatgggctggcactgagtgcctgcagcttttccaggcacatggtacagctgttgatggatctaccatttgggagtctggaggatggtggccctcttctcacagctccactaggccatcccccagcagggaccctgtatgggggctccaaccccacatttcacttctgtgctgccctagcagagtttctccgtgaggactctgcccctgcagcagacttctgcctggacatctaggtgcttccatacatcctctgaaatctaggcagaggctcccaaagctcagctattctgtgcacctgcaggcccaacaccacatggaagccgccaaggcttggggcttgcaccctctgaagcaacagcccaagttgtccttggcctctttaaccgcgactggagctgcagcagctgggatgcagggtaccatatcccaaggctgcacagaggagcagccctgggcctggcccacaaaaaccatgtttccccgctaagcctctgggtgatgggaggcattgctgtgaagatctctgacatgccctggagacatttccccattgtcttggcaattaacatttgactccttgttacttatgcaagtttctgcagcggcttgaatttctttccagaaaagggttttccttttctaccacatagtcaggctgcaaattttccaaactttcatgctgtcacttcttgaacactttactgcttagaaatttattctgccggataccccaaatcatctctgtcaagttcacccagatctctaggtcaggagcaaaatgccactagtctctttgctaaagcatagcaagagtgatctttgctctagttcccaataagttcctcatctccatctgagaccacctaagcctggacttcactgtccacatcactaccagcattttggtcaaaaccattcaacaaatctctagcaagctccagatgttcccacatcttcctgtctttttctgagccctccaaactgttccaacctctgcccattacccagttccaaagttgcttccacattatcaagtatctttatagcagtgccccaaactcttggtaccaatttcctgtattagtacattttcacactgctataaagaatgcctgagactgagtaatttatgaacaaaagaggcttaatcaacttacaatgctgcatggctggggaggcctcaggaaacttacaatcatggtggaaggcaaacgggaagcagcaacttcttcataaggcatgaggagaggggagagcaggggaaactgccacttataaaaacaacagatattgtgagaacttgctcactatcacaagaacagcataggcaaaactgcccccatgatgcagtcacctcccaccaggttcctcctttgacacatggggattacaatttgagatgagatttgggtggaaacacagtcaaaccatatcatcatggttgctggtggattagttgatattctgaggtagagatacaataagctatcagtttgattaggtctgggttttgctttttctatggtaatgtaaaagggcaggaagattagtatgttacaagttcactgcaattacaaatcagtctctgtacatataagaaagcacaaaatcacagacctagggtcttgacagatatgaaagcaaacctatgtgatatcatgtccacatctttacctcaaactctcacctaaaattactagtgaggacttttttgtcctgctgttagtatttgataattctaggtagcatgcaataagatatggaatatatgtataacttgattttataatattaataacagcctaattttaaatatatatgttgtgccttgtactctacagaaaatgcacactttccttttttctctaaattaggtttaatttatttcagaagtttctagattttattgtctctatttagccaaagctacaagaaaggtcaaattaatatctttaaatgctttcattatcaatcaagaaagtgaaatgaacaaagaattttactcaagaaactagtgagaaatcaaagaaatgtccaaaaagtagaatacaagaattaataaaaacagattagcagtggaataaataaatgaatccaactggttctttgtaatggaatgtggaaagacatactctattcttctggataggaagatgaaatatcataatcatatcaatgcaagttttatgcatgctcaaacatgtataaactaagaaaaagtctgaaaggacatacagcaaaatgtttgcagtttttttcctttaagtggtgagattaaaggtaatacttttcttttttatacttttctgtattttctaaatcttctgtaaagaacatataattttatgatcaggaaaaaataagacatttaaaaaataccaaattacctctcattaatacgtataatgcaaatgccaatcaaaataccagagagacaaatgagggactggggaagaacttcaaaaagggccacatgggagattaaacgttatgcaaaagagtaatgaggaatcttaaagcaaaaaaagggaaagtaatcttattctacaggatattaaaacctaatgcaaagcttggctagtgacttctaataaaattgcttccatactttaaataaaatacctgcaaatttagaacacagacaaagatagaaactcctcacatgacccaccatgaagcccatcagatggcagaatgcagaatcaggttgcaatggactgatcttaaaacacatgaagcagtagaaaaaaatcttcctggagctgatggtataatttgcttcttgaaacaatgacagtccatgaaataaggtgggaagatgttttgaacctctctcagcagcagatccctaaatcacagacccagaacttggaggaaacaggaaacaggaggccatctctgcacctctccagcactgctctggttggtgggcagaatatcatacagtcatcacgattcttatatcaaaaaccaaaattctagactgattagataattatttttttttaatgagaaaagttattgtttattgaatcttgggctagggaagatatttccaagcaaaaagggtaaaaagaaagaaaaagaaatgattaacagattgaaatgcaataacaatgtaatatcaagtgctggcaagagctcagggaagtgtgtgttctcatgactgctggaacaaattggtataatatttctgaagggcaatctggctggatatgttagaagtctttaaaatgtttatgctctgactcagtaattcaatatctaggaatttttcctaaatcagtaataagagagagatgaaaaaaagtatttacaatattgaaagactggaaagaacataaatgttcaataatacatatatgttcaacaacaggggactagtaaatatgaattatttatatgataaaatactatctaaccttaaaataatgttttaaataatatttaatgatgagaatatgctgagaaaagtttaatcattttaaaaaagttaaatgcaaaatgaaagttaataacatgtacaagattattctaaatttttttgttgttgtttgagatggagtctcgctattgttgccctggctggagtgcaatggagtgatctgggcttactgcaacctccacctcccaggttccagcaattctcctgcctcagcctcccaagtacctgagattacaggcacccaccaccacgcctggctaatttttgcatttttagtagacacagggtttcactatgttggtcaggctggtctcgaactcctgacctcaggtgatccaacctccatggcctcccaaattgctgggattacaggcgtgagccactgcacccggtctattctaaaactttttaaacttatgagataaacatacacacacatatatctggaagaaaactccaaaatagtggcaatgttttggagggaaaattgggagtgattttaattgtctgttactagcagctaaaagcatgccaatagacctggcaaactcccactcaatcttcagaattcagctcagttgtcacttcttccaggaagtcctcctgtactactcactaccatattacactaggtgttctgctttgcactagactagagtctgggcataactctatgatattctttccttctttctttccttccttccttccttctttccctccttccttccttctctctctctctgtcttttcttttttttctttccttccttccttccttccttctttctttctctctttctctctctctctctttcttgatggagtctcattgtgtcacccaggctgaattgcagtggcatgatcttctcagctcactgcaacctctgcctcccaggttcaaccaattctcctgcctcagcctcccaagtagctgggattacaggcccccgccaccactcccagataatttttgtatttttattagagatggggttttgccatgttggccaggctggtctcgaactcctgacctcaggtgatctgcctacctcagactcccaaagtcctgggattacaggtgtgagccactgtgcctggctgatattctttatcactgcattgtactctctgctttgattctctacatctcaactacactttgaactgtctaccaccagaaatttgggtgtttcctttttgtatcccagtgccaatctgtctgcaatctaacaggtcttcaagctggaatgctggcttcatgagtgaaatagatgagcaaatgcttctctgtgctctgtgaatttagaggttaagggtagaaatgtgaacaaggatgggcaaataccagtaaaaagctatctctcctcaccttggccagcaggctggaaagatgtttaatttcaccaattgcctttagtaattcttgtctgaactcattgcgagactgttccagtagatccagaataccatgctgcttactaatgcatgagacacatgagtttcctgtggatctgtgacaaatgaccaaaaacttggtggcttaaaacaatagaaattaattttctcacagttctagaggtgagaaatcttcaatcaagatgttggcagggccctgcttcctacaaagggcctagggggatgccatttctcaccgcctccagctgctgtggttccacgtgtttcttctgtggctacatcactccccttcagcttcctagcccctgcaggtcaggaaggcacaggaggaggaggtgggaatgggtgtggagggccacacaccaggccagggcagcaggcactcagaacacagtggcctagaagcggggtaccaggaagccacaccagccttcagggccccaggcatgctccctcctgccaaaggcctttgcacatgttgttcctgccttctcaaatgttcctccctatcctctctgctgctgcatagcaaggtaacttctactcagtcaaaactatcactgtctagcacaacctaaatgtccataaacagaaaacatcaacaaatgacagtgtattcatgcaatgaaatactatacagcaatgaaaaagaatgacctatgaccacatgcaacaatataagaggatctcacagatgtcattgttgagtgaagaagccagactcaaaagagcaccttcctcatgcatctatagaaggcaaaaagaagcagaattaatctacagcaaagggctgagaagagtggttacttctggggggaagtattggatgggaggggacaaaagaaccctctaagggctgggcttggtcttgtccagcttggtctgggggctgagactgagtgcacccgtgggtaaaagttcatcaagttgaacacttaaactgtgtgttcttcctacaatgaaaaaataaaaacaaaacaggcccctttctctgagaagccttttcccagactagagacctgtccccaggatgagctgccagggttctgtgcaaccttcctgcaggctattgtcgcgctgtgatggtctgtgtccccgtgagatggtgaggtggagtctctaggtttctccaagcagaagattgtatcatctgcaaacagagaaaattggactttttcctttccaagttggatgcagggctattattttatttcaggccattttccaagctcattggtttttgtcagaattcagttcctatagtcacaggactgaagattctggtttctttttgcctgtcaatggagagttgttctcaaatcctagaggtggcccaccattttatggcatgcagccttccctacagcatggtaattgtttaccgtggaagaaaatcttacaagaaatcttcatatcacctaccatacagttgcctctaaatttcaaatgttcatattctccctaaaggcaaaatacatttactcccttccaaagatttcatctcatcatcagctcaaatccaaagtattattatctaaattgtatcatctcatcagctcaaagtccagaatggcccctaaacatcacaaacttgaagtttagaatcttaacttctaaatgttctaaatcaggtgcagatgggtacaaatcattcagtgcagctcctgggggcacactttcaatttgtggacctgtgatgctaaagaaacaagttattttctccaacaatcctaatatacattagtggacaggcagaggataacagttatgtgcatctggataaagataggtggcagaggctgggcacgttggctcatgcctgtaatcccagcactttgggaggccgaggcaggtggatcacctgaggtcgggagtttgagaccagcctgaccaacatggagaaaccccatctctactaaaaatacaaaattagctggtcatggtggcggatgcctgtaatcttagctacttgggaggctgaggcagaagaattgcttgaactcgggaggcagaggttgcagtgagccaagatcgtgccattgcactccagcctgggcaacaagagtaaaactatgtctcaaaaaaaaatatatatatacaatatgttcacatactaaaacagcatgaaaacataaaaattaacaaacgagccataaatagaaagtaattaaaaattaaagaagctatttcattgaatgttatactggtcagcattgaagtttgccaaaatttaaagatttcagattgttgaacgtgtatgttaataaattatagataagaatatatgtatttataatatattttaacagtttcacttcctcagaatagtgttactactcgagtatcaaagaggccaattgggtcatgaacacatgtagaagcatagatgcaatgtttataatctaatctccatggaaaaaaaaatgctcaaaaacctagagatgtgagtagtaccaatgcaatttctacaatttgtcaagattgtttaaaatgagaatttctatttccctggttggctgttacttttctggaagcctgaggagaggagaagctgtcagtggaggtccctgaagttacccaggcccaggagagacacagcatcagctgacaactgcagtaaatgccactgaagaccctcactgggaagaggctgcagaaccgtgtctgccatgctcgtgttttaaatgctggccaagctgaatcaaaactccttttcctttttcaaatttccttttttaaatagaagaagtttcaggtactcaaaaaatgtcacacaagacttattgtgtttgccctgtatcatttctttcttaaacaatttaagcaggagttatttcacatactgtatttggcaatcagcttttgttatttcaaaccaatgaagacaataaatttgctttcttcctctattctttttctttcgttttctttttttttgagacggagtcgcgctcttgtgcccaggctggagggcagtggtgcgatctcagctcactgcagcctctgccctcgctcgctgcatccctcccttctgcaggtaagatgccaatatttaccctactgaccgtggccagttcttggtattgctcaagtcccctgggccttcagactggcgggtgacttcaagggaccaaccatcctgggcctctcctgggacaaacacttgccttcacccactatcgatgtcttgctcagccctcagaggagcgtggttggcgtggattacttcatgccttgattctgccttcccggaaaccacggtggcagcaggcttggatgtcaccaagtcaccgtgtttcatgctatttctggaagttctcgcctttgtggcctcggaaaggaaggcgatctggtgctttggggaaagccctcgggatgctcctccagatggtcttcttcaggccttttgctcagcattggtctgatcagttctgccagctctgggccatgatctcttggcactggcgcggctttccttcaataattccataaactccagactccgtgtcttttgcatggaaagcacgcggtgcccatttcatcgacaccgcaccccggagtccaaacgtcagccctgcgggtgtggggtttgttggggacaatttcgggctcaggtgcagggggcgcttccccagcgcgggcgcgtcctgggcgccatctgaggccgtgggctcctggcaggaggacctggagctttcagatccccgggaaggatgcatttcccccactcttgggcacaagctgccctttggtggcgttgggcacagatcaccgcctggcagaagcccgcgacagcgtggagggagcgatgcccccgcccgggactcctggtgggtgatggcgccgggaggccttggctgggacagatcggggcctcccggtcggtcagcgactcgcgcccggctgcgactttcagaggcttttggacaccgcctgccatcccgccgcgcctctcggggtccgctcccccggactggccctgcccacggagcgcgggtagcagccggcggccaggagccagtggcgggagccaccggtgggaaaaccggcaggaggctgcgctggaccccgctgggcagcgccaatccctaaggcagccgggcgggtgagctaacggcggcgggggcggctgagaggctgaggggctgaggcggctgaggcggctgaggcggctgaggggctgaggggttgaggcggctgaggcggctgaggggctgaggaggctgaggaggctgaggcggctgaggagctgaggggctgaggcggctgaggggctgaggctggtgaggggcttgaggggccgagcggataaggcggctgacgcggctgaagggactgaggggctgaggtggctcaggggctgacgcgggtgaggggctgaggggctgaaaggctgaagggcgggcagcgtgccgggtccctgcggctgggtccaccgcacgtcacgtggcagaatcccggggctgctttctctccggctgctcagccacttgttttctcactgtgaacctcgtgggctcctgctcggtgtcctttcttactctgtctctgtttttgcattctattggcaagaatgttatttaggatattttactgatataactgaggatgaactgtgttttgcagcattttgttttattacgcgttttctcctagattttggtatcatttttatgctgacttgattaaacattttggaaactttcctggaactgatagcttttatatgatctttttcttgaggtaataaaataatttactttgaaatgtctcagcctaacaacttttgtgcttttgttgttttgtgcagaggtgggaagactcctttgcatttttggtatcacttctgtgttaatgattttgttgtttgtttcgcaaaatcacttagtgatccgtgttttccaacttagagttaacatgcaccattttgcgacataaaaaaatgtctcgtatatctctttgtatgtctcttttcgtttctcatgtttggaattgtcttcattttttcatcattagtttaaagtaggaatttattaaatattcccaaaagaccgaagttttacttcatctcctaggcaattcatttttcaatgtgttattcactgatttctccacgttcattaatattgggaataatttatataaattgattattgctgcgttacaagcttacggagcaacattctgtcttcagtattttaatgtattttttaattaaatatactttagtcacttataccatatttaagtttattttcctgattctaggccctctaattattaactagaatgctgatagttttccctaagcttcaattgtttataatttattcatttatgacaggtgagcataaaactacttcgttatgaagattcaatgatatattgtgtagagattttatactatgtgcttggacacaaacactcttaaataattgttatttttttctacctgcttttgacataatgaaagtgcatttttaattttttaatttttttatttagttgtaacagactttaggatataatggtcccagattcttttgttatctgttttatagccacattgtttattctgttgtcattatatagtatttacatgctgtattagtctactcaggctgttataacaaaatactataaactgggtgctttcaacaagagacatttatttttcacagccttggaggctgggaagtctatgaccaagacaatggctgatttggttcttgaacaggctttctggcctcttcttataagggcattaattccatcataaggaccccactctcatgacctcatgtaaacctaattaccttcaaaggccctatttccaaatcccatcacactcagagttagatcttcagcacataaattctaggggaaacaaatgttcatgccataacacacactgctgaccctttctttccgtttccatagttgtttaactttattatttataatattttggaggaatatcataattatcttttgggtacttattaattttttaatacaaaatgcatttattaagcagtgaaaatgctaataaagtcatatagtagttgcttcctatactatatatatcttgcgacatttgagaaagattttgcataatatatgtaatgctatcattcaaacatgtttaataagtaggtcagaaagagaagaatgttttccatcttcaaccaaactaaggatacattccaggtccaaatcaccaaatacatgaacttagatttaaatgtttgtagtcaggcattcaactgtttaattacagtccacccggaacacacattttattctcagttctcatatcagcagggcattgataatgtgtacttgtctaacggcaagtctgagcattagcttttgatagcattttaacccaatttaatatttctgtgtgtgcttaagtggatagacaagcattctccaacactttttctgatgctggaaatgttctctgtctatgtacgaaatatgctaaccactacccacatgtggcttttgagaagttgaaaggtagatagtgtgactaaccaaatttttatattattgtaattaatttaaatttaaatgtagtagccatgtgtggctattggacaccatacctctaggttattaccactggtatctagatagatcagacaattcacagaagcctcacatgtaaccccattcttcttaatgtcaaagcatggagcctgctacttcatctctctacacttttgagttatcactcattttttaccctaacataagtcaaggtagatattatgccaaaaattatagaaaactattgttaggccaggcccggtggctataatcccagccctttgggaggctgaggggggtggataatgagatcaggagttcgagacccacctgaccaacatggtgaaattccgtttctactaaaaatacaaaaattagccgggcatgatggtgtccacctgtaatcccagctactctggaggctgaggcaggagaatcccttgaacctgggaggcagaggttgcagtgagctgagatcacgccactgcactccagcctggatgacagagtgagattctgtctcaaaaataaaaagtaaagagaaaagaaaactagtgacaaaatcagtaacttagcagttttccttgatctctttgatgtggttcaataaataatcttgtgtttttcttttttcttttttttttttttttgacagagtctggctctgtcacccaggctggagtgcaatggcgtgatcttggctcactgcaacttctgcctcccgggttcaagtcattctcctgcctcagcctcctgagtagccgggattacataatcttgtgtttttagtataatccctatatgttgattttattatctttaaaatgataacactaggaagacctacttcatattattttatttttttgagacagggtcccactctggcacccaggctggagtgcattggtcctaacagggctcactgcagcctcaacctttcaggttccagtgatactcccacctcagcctcccaagtagctgggactacaggtgggtgccaccaagcctggctaatttttatattgttttatggagacagggtttcgccatggtgtccaggctgatctccaattcctgagctcaagagatctgcctaccttggcctccaaaagggccgggattaaaaatgtgagccaccatcccccgccctctataattttaaattaggcaactgaagtaatgcatacatcataccatatcatgttttataaagcataaagtcaggataataaggtggttaagaacatgaatttagagatgaaaccatgctggaaaaagttactgaaattttaaaagaagtattttaaataatacaaaatatttatattatcacttttttttttttgagacaccatctcaccctgtcacctggttggagtgcattggcacgatctcagctcattgcaacctccacttgctgagttcaagcgattctcctgcctcagcctcccaagtagctgggattacagacacccaccaccacacctaatttttgtactttcaatagagacagggttttgccatgttggccaggttggtctcaaactcatgacctcaggtgatctgcccatcttggcctcccaaagtgctgggttaataggtgtgagcaaccatgcctggcctatcattacctttttgattattaaagggttacattaaaatgataggatttaaaatatcatttaaattattcaaatttttattcaaaatttgagaagaaaattctgggttacaaaataggcgttattctgtaagttctgtgtcctgctctgagcataagtggtctgatattaggaaagtcaataattaccttagtagtactttctctttaaataccataaataaataatgtaattaaatgtaccatttaatcattacatgtggtaaatcagtgacacacacacacacaaacactcacagtgaatttaccagatgcatcccatcagtctggcaaaacacctatgattaataaaatatatgtggagacatattggtccctactcttcagagtaaaattcaggtggatatggatatattatcttttcctctgaaactaaaattaaggtaatattctaccttttaaggggataatcattctcatttttaacaatgagactatttctgtcattcacttacctatttcacaattctgagacaggctgaaacaaacaagaaaaaaccatatgtattaacatatgttatcttatataaaaattattttgactgtacttctgccctttattaggatatatgctaattaaatattatgttaaaggatctataaatgatgatgaaataattttcaagtacagtttaagtaaagctacatctattcttgctgctcctgtcatagcctagatttatagctaattttcatgagttaccgttttgtaatacacatccccccaaccatgccacttcccagcttttaaaagaacttaaggatttttaataggaatttagagaaagtattgctgcctcctatcagaatttactggcacctttgctcacaaattggaagtaaaatatgtcactgtgacccttactggtatccctgatgtgtgacatcaattgcacattttctttcctctgattttatgtgtatgtttggtagatcagataaacctgggacatgtcggccgggcacagtggctcactcctgtaatcccagctattcaggaggctgaggcaggagaatggcttgaacctgggaggtggaggttgcagtgagccaagatcacgccattgcactctagcctgggggacaaaagcaaaactccatctcaaaaaaacaaaaacaaaaacaagaaaacctgggacatgtcaaaatttctataatgaaatgtttgtgtttgcctaaaataaattcctattagaacaataaaagtgagaaacaaaacaaatgtaaaatggaaacaatttatataacctggcaaaacacagtaacattaacctatatttaatgaacacatcgaaactcaaaaccaataatttatcattgtagtaaaaatatacaacagaaattatgagatggtttcctcagtgaaaagcactgtgtgtacaatcagtccctagatgacttcatatttttctagtctaattctaagaatttgctcataatactataaatggaactgttttccaaataatattaacgtctatctttgtctatcaccattgtgtcaatatttgtgtgatcctttaaaatttagaaggcctagaaggatgcttttgcttttgcaatacaaaaaatggcctaacacagatacagatgatagagatatagatagatagggggtcacattttgaaatttagttctcgaagggacttatttcactgcaagtttgaaattattctagttttaaatttaacaaatgataaaccttatagaatgataacacaattgtacatgttataaagtcacaggttatatctaatgatgtaccaatcattttgtgttgaggttggtagcattttctttttttactgagacttcaattctcagtaaatgagaacagtttttacacagaggggccctaacaccaccacatactagggctgttctcagactgtgaggttctgcccacaccaagccaggatgagaattttattcctcatactgttctcggtacttgtttgtatcccataatatccccccaaaagttcattttttatgctgtttgctattcgcttacatttaatacatgtatcaaaaagttatcttcattttttttttttttttgagacggagtttcacttttgttgcccaggctggagtacagtggcgccacagtggctcaccgcaacctctgccccctgggttcaagcgattctcctgcctcagcatcccgagtagctgggattacaggcatgtgccaccacgcccggctaattttgtatttttagtagagactgggtttctccatgttggtcaggctggtctcgaactcctgacctcaggtgatccatctgcctcagcctcccaaagtactaggattacaggcgtgagccaccacgcccggcctatcttcgtttttaaaataaaattttatactatcgtttaatctatgtccctatagaataatcttgatccatatacttttgttattacaggcagaacaagataaaattcctctgtctggaataaatgccatgaccaccacattttgagcattattttttttaaattattttttaaacagaaatgtatctaacttacagtaaccaaattccttttcaaagtaactacatttcttttaagtgaaaaattaaatatttaccttctgttatcaagaattctctgaatacaaaatatttattttttttaacgttagaagaaattgaaaatatctacatgtactaatctaaaaatacaggcccatgctgttaacatgtcttccaaattttaaggaataggtatttaaatgctatgcactttgtttccaaatttagaaagtgtttcaaccttttggctgggcatggtggctcatgcctgtattcccagcactttgggaggctgaggtgggaggatcacctgagcccaggtgttccagaccagcctaggcaacatggtgaaatctcatctctacaaaaaattacaaaaattgtccaggcatggtggcaccacctgtattcccagctacttgagaggctgagaggggaggtttgctggagccggaaaagttgaggctgcagaaggtaaagtgtcgaggctaacagatgataaatatttaatttttcacttaaaagaaacattggttacattgaaaagaaagttgcttaatgtaagatagataaatctctgttaaaaaaaattttaagtgagccttgttagcaccactgcactccagcctgggtgatagagcaaaacctgtcgaaagaaagaggaacgaagggagggagggagggaaagagaaagaaaaagtgagggaaggaagggagggagggaaggagggaaagaaagaaaccaaagaaagaaaatgtttcaagctttacagtagcaaagccactctgtaatgaataaaccacagaaccaaaacaatctaaccaacaatatgataaacttctgatttgaatatcaaaaccaatttcaataataaatatatggtatgaaaaccccacaaaggtcaagtaggatgtgttatacttgaatgaaattatgagttgagaataggaaatctataaatctaatcaaacaaattgaagatttatgaggaaattgtactgccaatgtattacttggcaagttattcagtggaacacaaagacattcttaaggaagttgcatatatattttaaaatgttaccattgaaatggattttttaggccgggcgtggtggctcatgcctgtaatcccagcactttgggaggctgaggtgaatggatcacctgaggccagaagctcgagaccagcctggccaacatgatgaaacgccatctctgctaaaaatacaaaaatcagccgggtgtggtggcacgtgcctgtaataccagctactggggaggctgaggcaagagaagcgcctgaacctggcaggtggaggttgcagtaagccgagatggtgccactccactccagcctgggcgacagagcaagactccatcttgaaaaaaaaaaaaaaaagtggatttttaaaactgaggacattaataacttgaaaaagtattcagggataaagagagaaaaaataaatttagattgttgtttacatatataaatatattttaaaagataagcttgtctttttttttattcctgaaataaaaggagcagatatttaaatcccatgcctttcattttaaaatttgggaaatgcttacagcttcccacactgaaatttatactaacacaactaatataacatacggaaaacaaaataaaaaaaaaaggaattctcttgaccaatctattttcttgatttttaaaagtctaaatgtatactcaaagaaagaaaactattaataattgattctcttattcgaaaatatttactgatcatttaccttccactaagtgatttccagctcatggagatagatcagtggaaaaatacataaagttgcccagcttcgttaagcttaaattattattattttttgagacggaatctcgctctgtcgcccaggctggagtgctgtggccccatctcggctcactgcaagctcctcctcccgggttcacgccattctcctgcctcagcctcccaagtagctgggactacaggcgcccgccaccaagcccagctaatttttttttttttaattttcagtagagacggggtttcaccgtgatagccaagatggtcttgatctcctcacctcgtgatccccgcgcctcggacttccaaagtgctgggattacaggcatgagccactgcgcccggcccacgcagggactttaaaacatgagtattatgataaggcttggaattctaaaaattgcatactgtgattgctttgtggagactggattgaaaaaaagggcaatgataaagcttaaattcatatagaatatggctagcctataattttgagagtccctgaaataagagtgtataatagttctcaggctgggtgcggtggctcatgtctgtattcccaccactttgggaggccaaggcaggtggattgcttgaggtcaggagttcaagagcagcctggccaacatggtgaaaccctgtctctactaaaatacaaaaattagctgggcgtggtggcaggcgcctgtagtcccagctactcgggaggctgaggcaggagaatggtgtgaacctgggaggcagagcttgcagtgggcagagatggggccacggcactccagcctgggtgacagagcgggactccgtctccaaaaaaaaaaaaaaacacaaaaaacaaaacttgtattaaattggcttttttagaaatagcattttgacttataatttagacaccatcaaataatgtacaaaaatatgctgcttcctttcctttctcttcttaccagacaattgtcaattttcttttcaacttctttcttctacttgtttttttaaaaacactctgcacatttccaatcttagtactgcagaaacaaactctgtggtcaaaccacatatacaggaagagttgaattatattcaagcatttttaaaataaacaattccccctcactgttctgtgattattttatataatcgaatgtcttccagatgtacatcccaaaccaaacatacatctggtttgtacatctggttttcaaactctgctgtgttgtctaattgcatcagaattatccaaaattataataataaatagataaatgggcacaactccagatttatgaaatcaaaatttccagaacccaggaatatacattgaaaaatgtctccctcaggtgattctgacgtcacatgtggtccgaggttacaatgcaaagaaaattaccttccttgccctccagttgacccctatatccacatgtcctcttcctcttttgcattctgccttctctccttctgcaccttcgtccgtcctctcttccctccacttcttctagtccagatcccaagccctccctcaccaattctcctaaaactccaaatggtcagttgcctctaaagttccgtctgttccatgaacaagttatgcgggcaaatgtagaatttaagcttgggcccagctgaatcaagagctgcaattaaagatttccctaaacccagaggggaccagcaaatacttatagaaggttatagatttcctgtgagtgcagatggctcagggtgaccggatgctgtagaccaaatcttattgtccccctcaaattcgtgtgttaaaatcaaattccctatgtgatggtctttggaggtggggccttgggaggtgattacttcatgaagcagagaccccatgaatgggattaggctcaggcctgtaatctcagcaactctgggaggctgaggcgagtggatcgcctgagatcaggagtttgagaccagcctggccacatggtgaaaccgcgtctctactaaaaatacaaaatggcaggtgcctgtaatcccagctactcaggaggctaatcacttgaacccgggaggcagatgttgcaatgagcggagatcatgccactgcactccagcctgggtatcagagtgaaactctatctcaaaaaaagaaaaaaaaaaaaatgaaagcaggaggtaaattgtatatacatgcaaacatcagtgtcatgacacctaatttatcaggatttgataaattaattaatttgactgattttgggccacagagtcattggataacttgattccacttaaaacaagggatgattggtttggtttcaacctattctgtttttctaattcgtcctttcccacactctactcagaatgaatttgacattgtaaaactggcttgtatcataatggctactatgctttaaaatagggtaggtgctttgggatcgttggagttttaatgtacaaaccattcataatttatccccaaagcagtgtggattgttttgtgaatgttctacatcccctgatctgaaaactgaccagaaaagctaccactgagataaagcagccatccgacttaggggcctccttcctcccactctccaacaagactggaaataaaggaaaatcttgagttccttcaagggaaattccaggcacccagctggccctgaaaagtaatgagcaacttgataaacaagatcataatagtagcttaaaacaatagccaaggcagttagagttgtgagatgtttggttccctatagaaactaatagtaacattttaacacaagtccctgagttgtttttcagaaacccgaagccccaccaaatggataccctggcatgcagacctcagataagggggaaacagaactgaattttgaatctctgttctttcttctttttttctttttcttttctttttttttttttttgacagagttttgctctgtggcccaggttggagtgcagtggtgtgatcacagctcactgcagccttgacctcctgggctgtggcaatcgtgccatctcagcctcccaagtagctgggactataggcatgtgccaccaagcctggctaatttgtttttttttttttttttttttggtcggagttttgctcttgtcgcccaggctggagtgcaatggcgcaatcttggctcatgtcaacctctgccttccgggttcaagcaattctcctgcctcagcctcccaagtagctaggattacaggcgtgtgccaccacgcccggctaattttgtatttttagtagagggcgggtttctccatgttggtcaggctggtctcaaactcccaacgtcaggtgatccgcccgcctcggccttccaaaatgctgggattacaggcgtgagccactgcgccctgcattgtctttttttgttgttgtttttgtagagatggcgggggggggtctcactttgttgcccaagctggtcttgaactcctggcctcaagtgattttctccatctttgtctatcaccattgcatcaatgtttgtgttatcctataaaatttagaaggcctagaaggatgtttttgctttttgcaatataaaaatggcctaacacagacatagatgatatagatatggataggtagggggtgtattttgaaatttgtttctctaagggacttatttcacttcaaatttgaaattattctggttttaaatgtaacaaatgataaaccttatagaatgacaacacaattgtatatgttataaaggcacagggtatatcaaatgatgaaccaatcatttcgtgttgaggttagtaattttttttttttcctgagacctcaattctcggtaaatgaggacagcttttacacagaggggccttaacaccaccacacactggacttgttctcgggctgtgaggttctgcccacaccaagccaggatgagaattttattcttcacactgttctcagtacttgtttatatccccccaaaagttcattttttatgctgtttgttctctcacatttaatacatgtaaaaaaagttatcatggtttttaaaataaaaaagtatgttatcttttaatctatgtccctatagaattatcttgatccatgtacttttgttgttacaggcagatcaggctaaacttcctctctctggaataaatgccatgaccactgctctttgagcattatttttcttaaattattttttaaacaaaaattaatctaacttacattaaccaaatttcttttcaaagtaatcacatttcttttaagtgaaaaatgtttaccttctgttataaagaattctctgaatacaaaatatttattttttttaaactttagaagaaattgaaaatatctacatattactaatctaaaaatacaggctctgggtttatatggtgttaacatgtcttccaaattttaaggaataagtatttaaatgccatgcgctttgttttccaatttagaaaatgttccaaccttttggctgggcatggtggctcatgcctataatcccagcactttgggaggccgaggtgggaggatcacttaagtccaggcattcgagaccagcctgggcaacatggtgaaccccatctctccaaaaaattacaaaaattggccaggcatggtggcactacctgtagtcccagttacttaagaggctgagatgggaggattgctggagacagaaaaattgaggctgcagaaggtaaagtgttgaggctaacagatggtaaagatttaatttttcacttaaaagaaatattggttacactgaaatttggttgatgtaagatagataaatttctgttaaaaaaaatttaagtgagtcttgttaacaccactgcactccagcctgggcaacagagcaaaacctgaagaaagaaagaaagagagagagagaaagaaagagagaaagagagagagagaaataaagaaaaaggaaggaaggaatgagggaaggaaggaagaaagggagggagggagtgggggagggagagacagagagagagagaaagaaggaagaaaaaaggaaggaaataaaacaaaaaaaaaatgtttcaagctctacagtagcaaagccactctgtaatgaacaaacaacagaaccaaaacaaaaaaggattctaccgaccaatctaaccaacaatacaattatgaagttgattcaaatatcaaaaatcaattttaataataactatatggtatgaaaaccccacaaagatcaagtaggatgtattatacttgaatgaatttatgagttgagagtaggaaatctataaatttaatcaaaccagtctaagaatcatgaggaaattgtactgctaatgtattatttgacaagccattcagtggaacaaagatattcttaatgaagttgcatatatattttaaaatgttatcgaggtagatttttaaaaatgagatgaataacttgaaaaagtattcagggataaagagaaaaataaatttagatagtttacatatataaaatatattttaaaagctaggcttgtctttttttattccttaaataaaaggaatggatatttaaatcccatgcctttcattttaaaatttaggaaatgcttacagcttcccacactgaaatctatactaacacagctaatctaatcaatggataacaaaatcaaaacaaatggaaatctcttgaccaatctattttcttgatttttgaaagtctaaatgtatactcaaagaaagaaaactattaataattgattctgttatttgaaaacatttattgatcatttaccttacactaagtgatctccagctcatggagacagatcagtggaaaagtatgtaaagttacccaggtttgttaagcttaaattctaatgagggagaaaagaagtaatagcgcaggtactttaaaacaggagcgttggccgggcatggtggctcacgcctgtaatcccagcacttttgggaggctgaagcaggtggatcacctgaagttgggagttcgagaccagtctggccaacatggagaaaccccgtctctactaaaaatacaaaaaattagccgggtgtggtggcgcacgcctataatccagccactcgggaggctgaggcaggagaattgcttgaacctgggatgtggaggttgcggtgatcccagattgcgccactacactccagcctgggtaacaagaaccaaactccgtctcaaaaaaaaaaaaagtgtgttatgatacggcttggaattctaaaaaattgcatactgtggttgctgtgtagagactggaatgaaaaaaagggcaatgataaaagcttaaattcatatagaatatggctagcctataattttgagggtgcctgaaataagaatttataatagttctcattatttcccccaagaaatgtctgcagtagagccctgaccgtgtgagggaagtagtgtagttaccaagtggtgagggtgggaaggtgaatttgaaaacaccatttggaattactgcactttaaaggcaaagctggcaggttttccatacacgacagatctgaaaatgggtgtgtgtgtgtgtgtgtgtgtgtgtgtgtgtgtgtgagatggagagacagagagagagagaatgagaaccagacagatacagagagaactaaaaggggatatcaagaatattgagctgagaaactataaaatgggagttgccattaaacagataggggaagagcaagtctggggagtattggaggctccatgtggaccttcattttgagattcctgactgacacccaagtgaagaagtcagacggtgctgggtgtagtctagtgttgaggtataatatgaaatatcaggaaattaatgacacaaaaattagtaagaaagtaaataaaagaaagataagtccaggtcctgagcctagtgcttctctaacatttaaaaaatagtaaaggtgagaaaaaaacagcaaaaaaggactaggggtaattataaaaaatgtcaggggaaagtgggttaagtgttctggaattctatcaaagaaagttttgcaaaaaggacagatcacctgtgtcaaatgctgctgatacataaattaagacaaaggctgaggaattatgctttaattcataatttaacaatatgactatcgtttgtgctttgagaagagcaattttgttgtagtgagtaggtgagaaaccatattggagtccttactaaaaggaatgtctgatctctggattctctgttttttttttttttttttttttttttttttttttttgagacagagtcttgctctgtaacgcaggctggagtgcagcggctcgatctcagctcactgcaacctctgcctcctgagttcaagcaattctccagcctcctgcttctactcacagaagcagagagtagaatggaggttaccaggggtggaaggcaggggtttggggagacggtgaaatcattcaaaagtgtagttagacaggaggaataagtttaagagatacattgcacaacatggtgactgcagttaatgtattgtattcttgaaaatcaagaagggttctcaccacaaaaagtaagtatgcatatgttcctgagcgcaatgtaatcattccaccatctacctatttctaaacaggttttacacaacatatatacaattttatttgtcatttaaaaaacgaatgaattgtaaaaagaattaagtactggaaaacttgtcacagtttaggacaactctctttgtaaaattagtggttcttgggagtcaaaatgcttcctggtgccgggagtgagcgatgagccggcttctgtccctggcggcagagtcgccttggccgccttgccctgccgccgctctcgcgggttcgggatgttctatgccgtgaggaggggcggcaagtccgcggtctttctgaccgggaatgagtgcaaagcacaggtggaccggtttcctgctgccagatttaagaagtttgccacagaggatgaggcctgggactttgtcaggaaatctgcaagcccggaagtttcagaagggcaggaaaatcaacatggacaagaatcggagacgaaagccagcaagcgactccgtgagccactggatggagatggagatgaaagcgcagagccatatgcaagcacatgaagccgagcgtgaagccgagcgtgaagccgagcgtgaagccggcgcctccagttagcagagacacgttttcctacatgggagacttcgtcgtcgtctacgctgatggctgctgctccagtaatgggcgtagaaagccacgagcaggaatccgcgtttactgggggccgggctatcctttaactgtaggcattagacttcctgggtggcagacaaaccaaagagcggaaattcatgcagcctgcaaggccattgaacaagcacagactcagaaaatcaataaactggttctgtatacagacagtatgtttacgataaatggtataactaactgggttcaaggttggaagaaaaatgggtggaagacaagtgcagggaaagaggtgatcaacaaagaggacttcgtggcactggagaggctgacccaggggatggacattcagtgggcgagtatcttaaatgttcatgtcccatggctattgtgaccaaataagctaagtttactagagattaatggtttatgtaagtggtttaatgacataacaatttccatgaagttaatatcataatatatattaaaacatatttgaggctgggcgcggtggctcacgcctgtagtcccagcactttgggaggctgaggtggatggatcacggggtcaggagttcaagaccagcctggccagtatggtgaagccccatctctattaaagagtacaaaaattagccaggcgtggtggtgtgcgcctgtggtcccagctactcgggagcctgaggcaggagaatcacttgacctgggaggctgaagttgcagtgagctgagatcacgccagtgcactccagcctgagcaacgatatgagactctaagactccatctaaaaaaaaaaaaaaaaatttgagactgggctcagtggtccacatctgtaacccagcaatttaggaggcccaaatgagctgactacttcagccgagaagtttgagaccagcctggttaacatggtgagactctgtttctagaaaaaataaaaaattagccaggtgtagtggtgcatgcctgtagtctagttactcaggacgctgaggtgggaggatgacttgagctggggaggtcgaggttgcagtgagccaagattgtaccactgcactctagcctgggcgacagagcgagaccctgtcacaaaaaaacaaaacaaacccacccatgtacatgcatttgattcttttccttatcatacaagtaatacatttttttggtttggtttggtttggtttttgagacaggtcttactctgtcaccccaggctatggcgtgatctcattgcaacctctgccttctgggttcaagtgattctcatgcctcagcctcccaagtatctgggattgcgggcatatgccaccacacctggctggtttttgtgtttttggtagcgatggggttttgtcatgttacccaggctggtcttgaactcttgacctcaaacaatccacctgccttggcctctcaaagtgctgggattacatttgttttatgtcatttatttcttttccatgcctttttgcactagctagaacttccaacgccgttttttgttgttgttgtttttggttttgtttttgagatagtcttgctctgtcacccagactggagtgcaaatggcgtggtctcggctcactgcaaactccgcctcctgggttcaagtgattctcctgcctcagcctcctgagtaactgggattacaggtacctgctaccacgcctggctaatttttttgtatttttagtagagacggagtttcaacatgtttgccaggccggtcttgaactcctgacctcaggtgatccacctgcctcggcctcccaaagtgctgggattacagtccagtacagttttaaataggacaaatgaaaaagggaatccttgccttgttcctgattttacggggggagtgggagtgttttctgtgattggttctgttttttatttttatttttacttatttattttgagacggagtttcattcttattgcccaggcgggagtggaatggtgccgtctcagctcactgcaacctccgcctcctttgtttaagtgattctgctgcctcagcctcccaagtagctggaattacaggcgcccaccaccacatctggctattttttttttttttttgtatttttagtagagagagggtttcatcatgttgctcctgctggtctcgaactcctgacctcagataatccacctgcctcagcctcccaaagtgctgggattatgggcatgagccaccgagcccggctgttttttttgtttttttttttttttttttttgagacagagttttgctctgttgctcaggctggagtgccagtggcgcgatttcagctcactcaggggtgagccaccacacctggcctgtgattggctctgtttttagtaattatgtgcaaaccatctagaaccagctctgggcaatggtgttgcaatttccctccctccatgctggcaccataccagcccctctccaatgggagcccaagttgccagtgactgtggccaaactctccatttttgtctgtatcctgctctctttaggttaaaaagaaggaaagaaacatgaaaggccatgtgcaatttatttttataactcaaggagtttccccgactaccattttttttgttgccagtgggtgtgcatatagaagaggaatgctatatcctgtccctagaagtacacatggtggtcaggtatggtggcttatgcctgtaatcccagcactttgggaggctgagatgggaggattgcttgagcccaggagttcgggaccagcctgggcaacatggcaagacctctgactccacaaaaaaaaattgttttttttttgagagagcatctcactccgtcgcccaggctggagtggtataatcttggctcactgcaacctctgcctctgtcacacacacaaacacacacacacacacacacacacacacacacacacacaaagaaaagaaatacaggcggtgtttcagggaagggaaggttctgctggggtcctggaactgtgactgatggcctcagggatgcaggaataggccttctagcacagcagctagtaggctcccccaggccatccgctggcgtgtggaggtgcaggacctgggggaggcagtcctcaccccagctaggccaaggggtagggtttttaggtctgtttttaacagaactcagagcaccaggtgaaggtggaaagttggtaaactgggaaaacaaggtcagcatcttacattttctatactcagcagagtgtgccattcccggtttctgtcctgaggctttcagaggccacaacagccaggtttctttccatcttccctcagtcagtatgtagtcatttaaaattctttggttgttctgaagatcctttttttatgtataatttttacatgaaagacagctgcaaaatgcaagcctcagtagagtgggggagtttttcaaggtgagaagtcgctgttctctgcactgaacagggattgaattttccttgtctgatggtagcccatccccctcccccgccgccccccgcagggataacattctcaggaatttctcttgtcctagcccctttcatttcaaaaacaatattagtcttttgttttcctttttcattcatttgtttttttacagcttttgtagagaccaacccaagtagatgccagtgggtattaaacaaaaacacacatacccaggggacaagccctccagcggtgaggaatctctgccatgttctcttccctgctgcccacgaacattacggagactcccttagtctccccctcctcttccccactgaggggcggcttgtggagatggaggactcgggcccatagatgcagacccactgtcaaatccagcaatagttctcattcttccaaagctcgagtgccattttgagatgccctaccaatgacatgcagtaaaggacataacctcacagcctttttagaagcattttgaatatctacagttgcctcaattcacggggcatttcattcctctgatccaggttagagttttgctaaatctgtagcatcctgagtagcacactaattttttttttagcacactaactttaactacattagttgagtgtagttgatacatctgtggccttgtgtctataaagagcacactagattgtacccagcacttttggatatgacatgctaattagatgtatttaactattcataggaaagtgtatgataaatgactgtaatatttctaataaatatattttgtttctaattatttttttctcactgacatgtatcaatattttttcaaagtgccacccttaaactgagtctgttttcagaccagcatcttcatgcatatatccttgtcaggtcacagtctccactgcagctgctcttgcgggtggtgctggaattttccacagaggactgggctcctgctggttcctccgctgcccgtgtgcagctttcttgctcaggccacaggcttacgtgaagatcacccttcaaggcctacccaggacactgctgagctgtgcagatgtgcacacgatatgtgcaatgtcatacgtgtgactaaatgccaactgagaccccagaaaccactcatagggggaattatgccaagattgaggaggcagggtgatactttttttctttttctgtttttttttttttttttttttttgagatggagtctagccctgtcgccaggctggagtacagtggcatgatcttgactcactgcaacctccacctcctgggttcaagcgattcttttgtctcagcctcccgagtagctgggactacaggcacgtgccagcacgcccaactaatttttgtatttttagtagagaacaaggggtcaccatgttagccaggatggtcttgatctcttgacctcatgatctacctgcctctgcctcccaaagtgttgggattacaggtgggagccactgcgcccggccacagatattttgtaaatgattgcttccttacgcctttctagttcatgttttcttatacatagttacatttcttctttgctatactaaaaatccctaattttagttggtcagagagagggatttgagactgagctcccatctcctcggctgcagcatctgattaaagccttcttcctttgcaatactcatctcagtgattggctttctgtgggtgagcagcgcaggatctaggctgaagccctgaggcttcagtgacaaaatctgtttttcataatgctatctgtcttaattgtcctcaagaattagtatttgagtgctctctagattctcctttgtcacccttccttcctttctttcttcctttcttccttccttctttccttctctttgcttcgttctctccttccttcttttctttctttttttgagacggagtcttgctctgtcgcccaggctggagtttggtggcacgatatcagctcactgcaacgttcacctcccgggttcaagagattctcctgtctcagcctctggagtagctgggactacaggcacgcgccaccacgcccaactaatttttgtatttttagtagagagggtttcaccatgttggccaggctggcctcaaactcctgacctcaagtgatctgcccgcctcaacctcccaaagtgctgggattacaggtgtgagccaccgcgcctggccgtcacttttcttcaatctcactggtgctcgcgggctgaagggtcaggacggactagaggcgagcaatcctggtggcaccaggcgttccccgacccgcccgggtcgccagctgcacggaccctgggcagatgcgcgcagcggctgcggcacacggcggggagcggctgcttggccccatcctaaggcagcagaatgcccagagctggtccctggctccaggcgcaggccgagtaggagctgggcgggcagcggcgtcgggcaggcccttccagccgggctgacaggccgctctgacccagccatctgactccgcttgcgtcctggcagcgcggaccctagggcaactttgctgcagtggccaagccgggggcggaactgacccgtacccctgaaccgagcaagcctaggagcaggtgcgccggcggcgctgtgaagcggcactcatgacaggcaggctgggcaccgccaccccgaaacctccgagggaggaccagccagcccaggttggcgctggagctgcagcgccacctgcaggccaaggagtctttttctgggaggctggagctgcagcgccacctgcaggccaaggagtctttttctgggaggctggagctgcagcgccacctgcaggccaaggagtctttttctgggaggctggagctgcagatgcagtgaagtcacaggttccgtgatgtcacaggtgggcaggcgcactggtctgtaacggattggcttggccttacccacgaggctttgcggtggctgttggcttggcggtggtcgcttggcttggcgtggcagtgatcgcttggcttggcatttctggcttggcggtcctcctttcgcagattggaaaccgcgggctatcctgctgggaggttgtggccgaggcagtagctcgctactgatggcctcctggggtggagaaaagcggggaggggctgaggggtctccgaagccggcagtctacgccacgaggaagacccctagcgtcgggagccagggggaccagtggtacttgggctacccgggggaccagtggtcctcgggcttcccctacagctggtggaaaaacagcgtcggcagcgagagcaagcacggtgagggcgccttagaccagccccagcacgacgtccgcctggaagatcttggcgagctccacagagctgcccggtcgggcgacgtccctggggtggagcacatcttagctcctggagacactggcgtggacaagagggataggaagaagaggtaatggccaggcgaaggatgcgccgtcctgtcggggacactggctttctggtgcccgcaggccccacggcacccgggatggggaaacgtcagaggggtcaggggcccaggcctcttagtgagacgggatcaaatataaaggattattactattgcaaaagtgttggtctactttacaggagttttctttaaaaatattgcacttcccaactgtgtttatccattttctcaatttattcatcaaacataagctgaatacctattatacagcagacatattctactgtcgctcaggttccttccatccttaagaacttcatgttggccgagctcggtggctcatgcctgtaatcccagcactttgggaggccgaggagggcagatcacgaggtcagaagttcgagaccaggctgaccaacatggtgaaaccccgcctgttatgcttttgtctcagcctagacttagctaagaccttcatgataaattatcctttaggccctcggggttcagttcaaataatgttgcagaaagagaggagtttccttttttcattgctaccagatctgtatgctgaggacccttttcttagatcgtggaatgtcccatattatcctttcccagatttgtggcaggaagccatcaccagaattctgagtctcaagtatgttagttggatttaacagagctaagtctcatccatgactcatgaatatccatgtataaaatgagagctttggcagggtgcagtggctcatgcctgtaatcccagcaatttgggaggctaaggtgggcggatcacgaggtcaggtgattgagagcatcctggctaacacggtgaaaccccgtcactactaaaaaatacaaaaaaaaaatagccgggcgtggtggtgggcgcctgtagtcccagctactcaggaggctaaggctggagaatggcatgaacccaggaggcggagcttgcagtgagccgagatcgcgccactgcactccagcctgggtgacagagcgagactcagtctaaaacaaacaaacaaacaaacaaacaaacaaaacttgcttcagcagcaaacatatactgaaattggaacaaaatggagagaaattagcatggcccctgcctgcataaggatgatgcacagatttttgaagtggtccatattttgcgcagtcactagaagttcatttgactatttgctgactagttccaaagacagtgtgagtcaaagcaaactgggtatcacctaatattaaaattgtgatttttcactacaaaaatatgcagtaaggtgatcaatggagctgagtaacacgtgggatgttgtgtgcaaatatattgtcagtatgtatctcagaaatgagagaatgtcaacttgcatgtctttcatggaactgaaaaagaaaagtagcattttgttttccatgtcagttggagatgaacatggggattgagcatccttctaacaaagatctgccgattcagagtttgagtctgtatggaacagtagtccaagctaggtcttgacatctattagctttctccccttggcgtgattgatgagctcagtaatagtggacagtgttgttatctagtttgatgaaataatatatttataagtaaatttagttacaaactatgaactagctgtgatgccccaaattataagccacaaagaatagaactaataaaactagaacttaataacagttttggaaaactgcaacatttgaatattagaacctctggaaaaatacacattgggttttatttgtgattccaaaaccatttcctcaataaagctcaagaacaaattatttcattgcttcactgtttctctgagcatttacaaaacgttttcttgttaaatctttaacaacctagtgaaataaggcagtaaaatccttgctttttagaagaatacattgagcctaagagaagcaacttgtcagagaataaatagctgctggtaatagagctaggacgctttccattatgccaagctaatgtgagttaatttactgagctatactcccttcaattcatgagtacttcatctttttttcttcttcagaagcttaaagagaagttggtagaactcacaaattgaagtatatgggataattaaagttctgatattaactctgatattgtttgaaatactctaaaaatttaatatatttggtatttttcatttgttttaaaatagtaatttcatttattacatttttatccatagcattcagcaactagttcctgaatataaggaaaaacagacacctgaaagtcttcctcaaaataacaatccaggtaagacttctgatagtgaattatttttggtggtcctaccataggtaaaaaagaagtaagagtaaggaagttttgatcatgaaagagcagttttaaaaaatctttatttctttcttgataggttagatttcttggtaggttagatgtcacaattatttaaaaagttaattgtaggtcatttattttttcaaacaatctggtctgaaaaaaaattaattatggtccctaaaatcctatgtgatatttttgtataaataagaaaaagtgtttttttttgttttttttttgagacggagtctcgctgtcgcccaggctggagtgcagtggtgcgatctcggctcactgcaggctccaccccctggttcacgccattctcttgcctcagcctgcggagtagctgggactacaggcgcccgccaccccgcccggctaattttttgtatttttagtagagatggggtttcaccgtgttagccaggatggtctcgatctcctgacctcatgatccatccgcctcggcctcccaaagtgctgggattacaggcgtgagccaccgcgcccggccaagaaaaagatatttttgagttagtaagttgtatgttttctttatagtcaccttataatgaattagacttgttatgaaattggaacttctatttaatttttaaaataaatgacttatgtttagtaaatgaatatcaatcacaattgacccttaacaatgtggaatttagggatgcttgattccctctgcagtcaaacatctgtgtataacttttgactcccccaagaacgtaactactaatagctaactgttgaccagcagccttattgataacataaacagtcaattaagatatgtttggtatggtatatgtattaatatgctgtattcttacaataaaggaagctagggaaataaactgttaagaaaatcataaggcagaaaaaatacgcttactgttcattaaatgcaagtggatcattatataactcttcatcatagtcttcaagttgagcaggctaaggagaaggaggaagaggaagattggtcttcgctgtctcaggtggtagaggtgggagaaaatctgctcataagtagacccctgcagttcaaatccgtgttgttcaaaggctaactatattacatagtgatttgtgtcactaaaaaaaagaaattagtttcaaaactggaaactcggcaatacctttctggcaccataaacaaatggcaataagaactgtgaaatggccaggtgtgctgcccacacctgtagtcccagcaagttgggaggcctaggtgggaggatcgcctgtgtccagaagttccagaccagcctgggtgacatagtgagaccacatctctacaaaaacaaataaaaaattagctgggtgttttggtgcacacctgtaatcccagctacttgggagactgagatgggaggatcgcttgagcctgggagtcaaggctgtagtgagctgtgatcatgatcacaacctggatgacagagtgagaccctgtctcagaaaaaaacaaaaacacaaacaaaaccctgccaaacatacccaatgtgcactaatactaatgggaaattattttttaaagagaccttctgagtgcagaagtcagaaaagcaattccttgttgagaagaacaggtcatgttacatacttataaaccaacaaggtgtcactattattgactttcccccaatttgaaatcgaatgaggtatatttacttcattagaacaagatgtgtttttctacctgctggttaattgctatgttaacagtaattttgttagaacaagatatgctgttaccattagccaaaagattatcacaataaatattcaaatagcccaactctaggctcaacaaattataatgaaagtataaaaatgtttcacaataacaaaaaatgcttctgtgcttccaagatgtgatgcctaatgcattggacaatctgaactgtaagaggacacctttaatttagtacatgttaatcaaagaacttctctaagttaggttttgcacgttatgggagacaaacatgaaatagacatagttttggtctttgaggtgctcataatagaatagagctttctctatttaacttctgtgtttttttcaacagaattttcaaggaaatcatttattcatttgtccacttaacaaataattatcaaatgtcttttagtactaagcattttttttctaatgttacagaatacagacatttaaaaatactgctggggccagcacagtggtgcatgcctgtaatctcaccactttgggaggctgagatgggaggatcacttgagcccagaagttcgagaccagcccgggcaacatgacaagacctcatctctactaaattttttaaaaaacaataaaacattagctgggcatggtgccaggtgcctgtacttccagctacttgggaggctgaggtgggaggattgcttgagcctggctgtttgaggctacagtgagctatgatcatgccactgcacttgtgtctgggtaacagagtgagaccctgtctcaaaaaagaaaaaaaacaaaccaacaaaacccaggagcttgttattatcattgtcactttaattatttgatgaattatttattcagtgcctactactgtgttagatgccctctggaaccgtatagtgatcatttattatgttaaatatgtgccagacactttatgtggtgaggaatgaaagctgtaaaaaagtgggtaagatttaaggtaagcatgaagagtgagtagaacttttataggtaaagaggcagaaggatgatgtgggcagaagattgtgtgtttggcagaaggagcagcgagtgcaaaagtaagatgcttgagtgaactttgcagggtttatgagcagttcagttttgccagtgcaaaacatatgagatgtgaatggttgggaatgaagtgaatacctaaggcaagctcatgacagacttttttttgagacaaagtctcactccgtcacccaggctggagtgcagtggcgttctcttggctcactgcaacctccgcctcccgagttcaagtgattctcgtgcctcagcctcccaggtagctgggaatacaggcgcgagccaccatgcccagctgatttttgtattttcagtagagacagggtttcggcatgtttgacaggctggtctcaaactcctgacctcaagtgatccacccaccttggcctctcaagtgctgggattacagatatgagccaccactccctgcccagactttttaatactacagaaatgagtagatctcgggccgggcatggtggcttatgcctataatcccagcattttgggaggccaaggagggcagatcacaaggtcaggagatcgagaccatcctggccaacatggtgaaacctgtctctactaaaaatacacatgaaaaattagctggacgtggtggagcatgcctatggttccagctactcaggaggctgaggcaggagaatcacttgaaccttggaggcagaggctgcagtgagccaagatcgcaccactgcactccggcctgggtgacagagcaagactctgtctcaaaaaaaaaaaaaaagaaaagaaaagaaaaaagaaagaaatgagtagaacttttcctgtaggccatgggaaatttaccaggtggaatgctttgggctataaatactagatgacctaactaacagtggctaaaacagtagggaccagagttgttttgatggttcagtgataacacggtgttttgttcatgtctgttttcatggctgactaattagcaacagctccaaacatcatggtctcaccgacaatatctgaaggctgaaagggtggcttttctttacatatttcttttagttagggagaagactcagaagggtgcagttgacttcctgtaacattttattggctgggtcctaccacatgctcattcctaaaccaggcactggggaagcaaatgtaattactatgatgagcttagaataatcatttcttcttttggagtggggagggctattggcatgataaatatccaaatagatgcgtgtttctccagcaagacagaacagggaatcgctattgggtagggagacagcaatgtttactgtagggactcattggagtggggagtcacatgattagatttgagtattagggcaatctggttatggtataaagcagggattggcaagcattttctgtacagggctttttcatgtggtctgtcattcctactcaaccgtaccattgaagtatgaaaacagtcataaaaaggcaagcaaatatacatgactgagctccggtaaaactttatttacaaaactataaggcagactggatttgctccatggcctgtagtttgctgacccctcatatggagagcagctggaagataaccacataaagagacagggaaacaaaagaaacatttgcatttatcagagctatagtttccttgtgctgtcctcagactagtgtcagtctgttgtgaggttttcacccatccatggtgaaatcagtaaggttaaggagctcagttattcatttaaaaatgtcggtctttttcttggcatgatgcctttttcatttattttacttaaactttttttttcatttaagaaataacattaatagttgttttttccctataaaagccaattcttaagagcccatgtttaactaggaaatataaacataaaataaacgtgtcatagtggaaatataaagcagatggagaaaagaggtacagttaatatgatttagtgactgttgaatgtaaaaagataggggatagggagaaatctcagatgattctcaggtttctggcttgtgccctagcatttaaccgggacacgagggagtaggcagttttcaggtgtatagaggagagcagcaggtcagcagtcacgactaacagttttctctgcattgctgagtttactgaaatgtccatgtgggatattttcagtaggtaattggaaaaatttttatggctggagatggaactctgaggttggagttgcagacttggaataactgaggcaaagttgtagatctgagtgagcttgtccatgatgggaaaggtatagaatgagcagagggccagtgacagaaccctgggcatatcagcatttcccagaggaattaggaaagaagcctgagccgtggctaaagaaaaagaggagaggaatcataaagtcatgttgcaaaaatttacaaaggtgagaatttcaaggagggagtatcaattctaaccagtaagattactaaaaagtaaagtgagttaaccttttaaaagccttcagtggcactgtcttctaaagaacaatcatagagttgtggggttcgctgtttatgtgatcagtacttctgatgttcaaatgtggaagaatacacctaccaagagtctacctaacttttgtaactgcagcagctccctgtacaggatcagggaaaatggtcaagactggtgagttaatgtaccaccattttcctagaattgtctaaacctaaggtcatatgtgaggaaaagtgtagtctttcttacctgcttttttgtggaaatgcttgtttggtactcaagtccttgataggctcttctgaatgcattcccaaacaaacatctgacaacaacaactggaagccaccaccagatgcacgtatatatccttcctctgacatggaatcataatacagccatgttgtgacacaatttcaggttttgattaaaaatagtttacaggccagcagtttagacaaactgacattttaaaaatattttattgcaggaaactaatataatgtcctggagaaaaatataaagcgaaatgctgaatatagcagttctcagtacttggggttttggtcacatcaggagaaaagtcagtgcctgactccttttgttagtgcagttcccttttcatttaccctcttgtgatatttctgcttttactgcttccttttgaattccattcctaaagaaaatactattagaacacatttcaaatgcacttctttatatctgcaccacaatgacacaatgatgatggtctgccaagattttaagtgtcttctgggttgtcaaatacaaattgttttatctgacatagtttaaatgtgaagtgcttttctggtattacatttcttcagaaattggtaatctgtgatttaactagaatatgtggtcaattggattaccacacttttaaccatctatacataagatgtctcttctcccggccagataagttaaaagtcctgttgatccttactgatcagttccactatttgcagggttttttggactttttttgttgttgttgttgagacggagtctcgctcttccacccaggcgggactgcagtggcgctatctcggctcactgcaagctccgcctcccgggttcacaccattctcctgcctcagcctcctgagtagctgggattacaggcgtgagccaccgcgcccggcctggactttttttttgaacgggtgtgattatagcacactgcagctttagttcctagcctcaagcaatcgttctgcctcagcctcctgagtaggtggaacaacagatgtgtgctactgcacctggcctgctgcacaattattataaaaatgaattaaatcctacctagtgggagaaaattgactgtgatcttataattttttgttccagaaacttttatactgtagaatatattgtcagtcattaagattttctatttttaattgggttaaaataggattgttgctttttaaaattactttctgacatcagtttcatgcatttttaatgcctttagtccagtggatatagcagtacaggaatctccaaggcaaatgtcaaaaaataaaaaataagcagattagggaaaggtattctgtgaaattaccttctgattgtagtcacatgtaacacatcaacttaaacaataaaaaattgtataatgcaattgtatcaggggttcccaagacccccttcactgaggtttggtaattcactgagaaggactcacaggactcagcagatagtcatacttggggctttgatttattacatttaatacagcaaaaagacacaaagcaacattcgagaaaggaaaaggtgcatgtgtcaaagtctggaggaagccaggcacaagctacaggagtcatctcctgtgtagctagcaggatatgcttaattcccccagcctcaaattttgatgacacatgtgcaatgttgtctaccttaccagagtttcattagaggctcagcacccatgttttcgatggaggctagtcacataggccacctctcctctccctcacatgtaacaaaactctagactcccaggaggaaattaattgttcatagtaaaccacatttgcacaaacagtttaggcacagtgagccactcccttcttctaagttagggaatgctgggaaccctcccaaattcaaggtcccaaacaccagccaaggactagccttgcaagcaagcctttctaaggatgggtgtctcatgcctgctatatgaaatctttgctgcccagcagctatgcccctgagtaaatttttggtgttatcttaaaattttatataatataatagcaaataatatgacagaccataacatggtactggtttcagttgcatcattcatattaaatagcaaggctgcttacagttttgacatttggtgaatacttaacaggtattggtacataagttactatggcaatattaagtaattataatctgtccttcttatctgattaacctttcagtaaaattgtgggataaagtaggcataataagttctgatttaaaattagaataaaaattatctttcattttattttcatggatggaccagttttgattcatattgtactagatccctgtttacaattatgaaataagatcagatattcaatcatttttgtgaattttttttgcctaagtatacaattaaaattaattgctttatgtgtttttatatgcttcaatttgggagatagtactcatattctgttaccttgatctttagtgatttgcaattttcaaggtgactctgtctttttataatttagggtaatagcaagttcagtgagtatgtgctttaaaattaataatattattttctgagcagttttagattcacagcaaaattgagaaggtacagagattttccatattccccatgacccctgacatatgaatagcctccctcattatcagtaccccccatcggagttcatcagagttacagttgaggaatctaccttgacagacacatcacccccaaggtccacagtctacgttagggttcactcttggtgttgtacattctatggtgttggacaaatgtgtgatggcatgtatatacccttgtagtatcacagacaaaatagtttcactgccctaaatatcctctgtcctccactgtttcgtctcttcctctccactggtttctggcaaccattggtctttttggtgtctcagtagttttgctttttccagactagtcatatagttggaataaaacagtggtggatatctttttgaatatttaaacaataaagttccatggtaatttgattctgtcattttagatgttctttgtccttgcgtttgttttcctcatgttgtgttcatcagaacaggatctgatggcatatgatttgacgtgctgagaaagcgtgatctctgtagacgtttgccacgtaacggggagggtggggaaaaatggcatcatgcagtattccacagcactaactggaccattgtgctctaggagatgggtccagatagactctagcgatgggacgggataatctcaggagctggactttataaaactagaatcacaaagtcttgcatacttaccttgcacttaaaaagaagatcaggcagtgaacactacaggtgaataaatatgttcctctctggttctcttccttttagggatgagcttgaaaacagtctatattattataatatggctcatctacaactaaatgctctgtcataggaaatgccagtgtttttctttacaataaatgaaaaataattttgttttcaccagagagagtaacaactgttggcacattctggcagcttgagtgagctgatagttctgttcatatatatttttcttaccaggtagtactccctggcaacctgccaccactgtggcagtgtttcttcttaagcttctcactgaatgaacggtgtggctcagagtgaataagctctttaagggagtgatctttccaatggttctgtccataggaggtaaaatgggaggtgaatttgagccttgtttgtgctagggaaaatagctagaactcagtaaacattgccagcatctgccccagaagaggattagtgagagtgagtacactgatctcccttgagctcttctccactggcagctgagaagtctttgcaaagatccttgtccctggtctcttccctatgttttgccacataacacagcacagcacccatagacctacacaacaaaatgtacagttttccccccttatccatgggggatatgttccaagacccccagtgaatgcctggaagtgtggatagtactgaaccctagatatgcagtgtcaggatagaaggaagaggataagagtaaaagggggaataaagaatgtggaaggcagagagtacagagagtaaatgaagggaaaagaagcaagtggatatgatggagggtggtaaaatgagataatacttcaaaagaagagtggggtattagaaaggtggaaagaatataaggtgaacgtgcagcaccaaaacttatcagataagacaaactttacttgccaatatgttagttgtgctttaagtttaattatttcatcatagtgtggctatactgatgattttaagccagtcagatattctggtcagcaaatcatgtgtgtgtgtgttttgattatcaaaaatgaagaaagcaattaattacccttaataactatatggtggacacagtcttttaaaacattgattctgaaactttttggcctggggttcgttttatatgattaaatattattgcctagagggaaccaacaccctgaattaagaatttattatgtccattcccttttaaaacattttattacatatgtgtatggtcataaataatatgtagaatttgttttcatgtcctaaaattgtatataaattgttttacactctacatattttgcaactttcttttgtctggtcacattacatttttgaggtcagtccttattgacacaggaagctctggttttctatcaaatgactggatctcaaagtctcttcataatgataaataaataattaaaataaagaaaaattattgcaaattccaaagagcttttatttaagtcagttgtgtcttttgatatttactattttagaaataaaaactaaaatattttaaaaacaagcatgcggccgggcgtggtggctaacgcctgtaatgccagcactttgggaggccaaggcgggcggattacgaggtcaggagatcgagaccatcctggctaacacggtgaaaccccgtctctactaaaaatacaaaaaattagccgggcgtggtggagggcaccggtagtcccagctactcgggacgctgaggcagagaatggcgtgaacccggcaggtggagcttgcagtgagccgagatcgcgccactgcactccaggctgggtgacagagtgagactccatctcaaaaaacaaacaaacgaacaaaaaaacacaagcacgcacagccatacattccaatagcctttagaactatgacccattcaccattagagctatgatgttatgacacaccatgtctatgaaaagctccactgtacacgtgaaacagaatgagagtgaaaatggcaaataacattttgtattatttgacgtcttggcccctcatctggatcttgaactccagggattctcagatcataatttagagtcaacattttaaaccacatatgtggttgtggataaatgcaccctttatggtgaaatggactttaaagtttcacttatgtgtttttggcttttttctttcacttgtcttaaaaaatttaaatctcaggccgggcgcggtggctcacgcctgtaaatcccagcactttgggaggccaaggcaggcggatcatgaggtcaggagattgagaccatcctggctaacgcggtgaaaccccgtctctactaaaaataaaaaaaaattagccgggcgtagtggcaggcggctgtagccccagctactcaggaggctgaggcaggagaatggtgtgaacccgggaggcggagcttgcagtgagccgagattgcgccattgcactccagcctgggtgacaaagcgagactccgtctcaaaaaataaaaaaaaaaaattttacatcccaacaattttgtttatatagtaaaaaggaaaatatttttgttatgtattcctttcctgtctcgtggcactgtgtgctatttggatctagtgtggtcctagactaatcctgttctcacatgggaacagttagagcccttacagctcttattttgcaaataaatgtatgaagtttatccaagtatttgaaaggaaattctgaagatagtggtgcattgaggaaagaccatctcattataattaaaatagttttaaaagtatatttattatgagtttttgtaaatcctgtgtctctacaatacatacatacaatgctgtcatgtatatttaagcttaaaatagttagacataaattctgttttaaaagatttatatccacgaagaatcttaatggaaagcaaaatatgtattagagactcctgagtgaataaaagtaagtaatagtaagcagtaaaaatgtagaaaagtgagagatgatagttaattatacttacctgaatgaattgtaagcataggacatgtaaaatataataagcctgaatgcatagtgtgttgtgggagagagcaggatgtaggactgtttctgtgaagaaagcatgtatacaagttagtcaaattattgtgttatttacatcctaaaaatgaaaacttcattttcggatttttcagattggcatcctactaatttgacccttagtgatgagacttgtcagagatccaagaatctgaaagttgatgataaatgtccatctgtatcaccatcaatgcctgaaaatcagtcagcaaccaaagaactgggacagatgaacttaacagaacgagaaaagatggacactggagttgtacttctctcagggaatgatactctccatgacctgtgccaatcacagctaccagaaaacaaagagagcaaagaaggtaacaaagaagcatagagaattcagtcctagagtgcctctgcttggctgcatagagctatagttctgacttaaaaaaactttttctggtaaaatgtgctttgtgtttactcaccttttgcactgaacagaatactttttggcaggatatttgtgttcttcctttaaccaaagcaacatctagataacagagaattaggggaaagcatgattttctttaggaagtaggattatatttagaatatagggactaagtatgtttagggactaacataggattatatttaggataacttagtagagacctaaagattgctgactcaaacacaatgtggtttctttgctttatttttacagctctgaattcacagctgttagttataactatatgcactacaatttaaaagacaccttcccacacctgtaatctcagcactttaggaggccgaggtgggtggatcatgaggtcagtagttcgagaccagcctggccaatatggtgaaaccccatctctactaaaaatacaaaaaaaaaactagctgggcatggtggtgaacgcttgtagtcccagctactcaggaggctgaagcaggagaatcgctggaacccagaaggtggaggttgcagtgagccgagattgcgccactgcactccaacctgggcaatagaggaagactccggtctcaaaaaacaaaaacaaaaaaacaccttccaaaagcaaatattaagtgacttcctatcgtttctatgactttatgtattatagaattgactttccaagtcagtaattaatgagacttattgagaatttgctgcatagtatctccttggctgtgtccacatgagctaccaccttgcgttaataaatgtgttcgctagggatgttggttttggcattgacagtgttctatcaccaatgcaaataagaccagggaccactcttgagaacattaatgtccaagcatcttaaagttgtacgtaaggctttcataatgtgacttctgctcagctctccatctttagccctttcccctgtgtgccctttctctggccttactgaactgctggtcctgtcctgctgacccatccttcgactgcaggcaaacacatacactctttcaggcctctttctgccttttgttgctgcctgtcatgctctcactctttcctgtcccctaccccttctaattaggctagcctcactctttaagcctcagctcgggcaggatctctagaaaagtcatctctgacatgctttcttttcactctttaaatcctagtgcctagcacatagcaagactcaatacataattgctgagtaaaatagataatgactctttgtacaaagatgattttcaagattgttccctacagtcaaggagcaaagggaatagacatgtaaagcaataattgacagttcgggtggtggagatgcagtagaaaaatcagttctagggcagccctaaggaaggagatacctagatacctgtttacctggggaaagatgaggatgagggtcaacttcacctagcagtctgttttttattttatgtattttatttatttatttttagcagtctgttttaaaagatgaaaatattaatacgtttgtcagaataatacagggaaccatttcagatgttaggaagtggttgtacaccaataaaggtgtccacagtcattttggaaatcattaataaggtactattatgaagtggagaacagtatgcagcattgcctgataatattactactgcattccaaaattttgttttgtttgtgatggctttgttcattgatgttgggtggatgaatctgtgagtgaatcttcaacatgattgtatttctttaacctggtggcatctagtgtctcccagaaagtggtttgttgaagttttggagaattagaagtatttcttaaagaagtaagtattccactaaagatcaagcttcatttaaactctcaatttatgaaataaaatgaaatgtaatttaaaatctatttttataaagactatgtcttttatctaactgttctaagtagtttaactgaatgtttggattttgcagcagaacaagactcggagctgacatcagaggaagagcaagaaagacttaaaggatgcgaaaataagcagccacaggtgtggaaacatttaaactaaaatctaaatttctggtttaatactcttttctttgctttaataatataagctagcccaaatgaaattacctctcagactagcctttgagaaccaatagatccttacttaatatttaattttaaatacatttaaactagttataaaacacaatattgttagaatctatcataacttatagttaatctttacccttggagtagaggcaaacattccagaattttgtttgctcttccattcttacaatatccttatgggataaagaagataatgtcaattattgacatattattaagcagcagaaattatgaacaatttaacagtgatggccactgagttggattcatggtataagagtaatcatggccagtggctcaaattttgcagttttatattgccagttactaatgcctaggttaaagatgtggcctttcattgacttcacggtctacattcagtgagagtggggttatgaaatcaacccaactgcctattaagggaatcataccttgcagaatgggatctttggtgttagggtacaaacaataactttctaactttttagatgcagaaacttagtaagaattatctttaaagttttagtaagtgttattaggggaccatagtatatattagaacagaactgaagaagatagtctagatatataaccctatgatgttacagtatataatttaaattaaaacttaagaatttgcttttctttctgattggtgttgattcgggctcctaataatttgaagattgcctaccctccagttagtaatctatggaacttacatgtagtaatatatagtacttacatgtagtaatatgtagtacttacgtgtactgtaggggctcactttccaagtgaggacgcctttgtaacactagaaatcgtctgctaattcatttttggtagatttaatacataatgaattaagtttattccaaacaaacagtgacaaagttaagtttgctggttcatatttttctcctcctttcagctaagacaatttttttttaacttcttagttacaagccagtgatttgggagtagctaaacctagatgaagaagtttaacagttaaattttcattttaattatttgtgaatttttctttgttcatacctgttatttaaggacaaagctatttttaaaacatgtagcccaacagagaagacacccaagaaataaaacaagcaaattaatcttccacttttgcatctgcagaaaacgtctcaagaaccagaaatggctaaggattgcgatagagaggatatacctatatatccagtacttcctcatgtgcaaaaatctgaggaaatgtggattgaacaaggcaaattagagtggaaaaaccaattaaaactcgtcataaatgagttaaagcagaggtttggtgaaatttatgaaaaatacaaaattccggcttgtcctgaggaagagccactacttgataactctacaagaggaacagatgtaaaggatattccctttaatttgacaaataacatacctggttgtgaggaagaagatgcatctgaaatatctgtctcagtggtattcgagacatttcctgaacaaaaagaacccagtctcaaaaatatcatccatccatactatcatccatactctgggtcccaggaacatgtttgccagtcatcttctaagtttcatttacatgaaaataaattagactgcgacaatgataacaaaccaggcattggacatatttttagtacagataagaactttcataatgatgcaagcactaagaaagcaaggaacccagaagtggttatggttgaaatgaaagaagaccaagagtttgatttgcaaatgacaaaaaatatgaaccaaaatagtgacagtggcagtacaaacaactataaaagcctgaaacctaaattagaaaatctgagttctttaccaccagattctgacagaacatcagaagtatatctacatgaagaattacagcaagacatgcaaaagtttaagaatgaggtcaacacattagaagaagagttcctggctttgaagaaagaagatgttcaacttcataaagatgtagggttttacttgctgccactctttgttttttctctcaattatctggtccattctgattttccacttaggaaaagcatatgaaaagcatacagtttggttgtctaaatctgtaattgtgtgtagaaacagatgatttctaagtaataggagtttaggaaaactttctcataatcttcgtttcttaattgacctaagtctctctgtcagtcttccaagtggcgtatggattgtgaaactcatttagccatatatcatgtgaccttcagaaccaggagaggcgtcaagaaaatcgctaaaggaaatgtgatgagcttgagggctttttccttttaccgacttaaagatgagttgtgtctaacaataagatgggaatacagtagaaaggaagcaatgactaagaagagatataaaaatgtatctagcaggcgtggtggcaaacacctgtagtctcagctactagggagcctaaggcaggaggatcatttgaggccaggcattctgggccgtagtgtgctatgccgatcaggtgttcacactaagttcggcatcaatatggtgacctcctgggagcggggcaccaccagatttgctaaggaagggtgaaccagcccaggtcggaagtggagcaggtcataagtaactcctgtgctgatcagtagtggggtcgtgcctgtgaatagctgctgcattccagcctgggcaacgtagtgagacctcatctcttactaaaaaaaaaaaaaaaaagaaaagaaaaaagaagtatccagccctgagagctgcagcaaatattcctggccaatgaatctgtttattgtgcttttcaggtttttctgtttaactcaaactgctggaacttagaattgcatcatgaccactttaaatatttttcaacaacaagtatatacactttaatatatttgttaatataactactctccactgtttctgttgaatcagacctttatgttatgttgcttaataaagtacagtaagttttggcatatatattttttccatgtaagtagcataaatgctcagccaaacacttagtatatgatgccaaagtagaaagctgagtcctctacattgattagggcaggcctcccaccctccgctaaggcattaaattattttacccaagtcacacttttaacctatctgattaatttgctgaatttgtctgattcagtattatggaattgtactgtctcttttggtgccacaaaatgctaggtaatggcactttaggggctttggatcaatcattttaatcttttttggctttagcccagttatctatagagagtgagctaaagtagattcttatactgtatatcctccagctataaacttttatggctattgaatgtgaaatttgggaagcatctcatttccagaattccaccctagctcagcagtttcactctgctttttgtgttgtggcagacttgtatttcagtaagcaccttcacctttttgatatcccaggattcaaatgaaaaaaaaaaaaaaaaaaaaaacaaaagttagtgggggaaaagaatagcttagtgcagaaaagggaaagcttcctttcttttcctgaaaccccacagtgttgtatcctctcaatctggctgtttaatatgaaagtcaagtggcaaagacagaagaagacaagctttgtgtctttatcttcttatttccatgtttgtgccagtcaaatgaggtaaaaattcataatacatagtaaagggtggttgggaataaaagcacaaaattaagaagggccctgcttgaaattttggaaaattctgtctcattcattgaaacagaaatgaagctgactttacaaaaatgttgatgataaaattataataattataattatatgatgatagttccagatgtgataaaattaaagtaagcaccaaatattttaatgactgaaattataattaaactgagtcaagtgatgatgaaatcaatgcaaacagaaaaaagttctttgtattgaataaagcaataacaatcatcctgaacatcaaactctcactcaaggttgaagaagaaatggagaagcacagaagtaatagcacagaattatcaggaaccctaactgatggtactactgttggcaatgatgatgatggactaaatcagcagattcctaggaaggaaaatggagagcatgacaggtaagcctatagcagcgtttaacaggagacaattggtcaagcgtggtggctcacgcctgtaatccagcaatttgggaggccaaggcgggtgaatcacctgaggtcaggagttcaagaccagcctgaccaacatggataaaccccatctctactaaaaatacaaaattagccagatgtagtggtgcatgcctgtaatcccagttactcaggaggctgaggcaagagaatcatttgaacctgggaggcgggggttgtggtgagctgtgatcatgccattgcactcgagcctgggcaacaagagtaaaactccatttcaaaaaaaaaaagcaaaaacagaaacaaaaacaaaaaacaggagacatgtgctatgaaatgaatcctaatttgggctaatattcatgatgaacagattttatacttttactaggatattcagccttccttggttatcagaaaaatgcaaactaacaatgagacaccatgttttctaatcatattgatattttatttaaaaaatcggaagtattggcaaatgtgaagaaaaaggcgttttcatacacttgttaaatgaaattgatgaatcctttttgtagggtaatttagtagcatgtatcaaaatttcaaatatgtcacttctttaacctaacaacttcacttttgggacaagatcctacaggaaaatatgacttgtgtaaacacatacacatatatgttaaggacatttattacatgtagtatgtaacatacaataggctaataggttaaatatatataatgttaagtatatatgatatatttatgttaaggatatttatatatgttgcatatatacttatgtataaggatatttattatagcattataatatcaagaagttggagatagtctaaatccttagcaataaggaaatagtacaattgtcatacccagaaaataatgtagcatgcactcattttaacaaaagaagttgttagaccaggagtgtactgattatttcacaattaaagtctatttaaagcctttagtttgatgacacatcttaagccagttttgttggaattctcgtaatatctgctgagttacaaaaggaagctagctacatgctacattgacactgtaccttgttagcaacagaattctagttattaaatttttgttttttgctgtcaatgtgtgagtgctgaaataccagatcctcaaattaatctgaatattgccaagggattgcacatggggattcatgttccgtgtcagcttttcaatatactgggtaaaacttactaaaatacaacagaggatcttagctctactgaaccaagaattggacagctatttttgtaaagagccagttagtaaatattttaggccttgtgaattataaagggcataagtgtggctgcatttcaaggaaatttccttatgaaaacaggcagtgggctggatttgctccacaagcaccaatttgttgatccttgtgctaaaaccaaggtgctgttatgcagtgaatcctctttttaaaggtaccctacatgcatgccattatcctttcttttaaaagataatgtatttcagtaggaaacacaccatatttttcaacagtagcttcatataatttagacaaatttgatttacaaaataagattattttctgcacttgtccccttttattcgtgttatagaattccatattttgactattactttgtatatttgatgagtataaaatattctagaattagatgatttttatcaagcaagaaatacttctcctgaaacttttagtcttccttggtctttatgtataagcatgagcaaaatgataatcagcttatataatctagaaatgttcaagaggtcttttggttttataagttaatgaatttttatttaataccttcatctggcatttcaaaaatgccatatagatatgatttaaaaaaacttttaaagggtaaaaatatagtatatagttatataagaattgaaaaatacagctaaacaagaagaaaattagatcatctacagtcatgcccctaggtatgctggccttgaaagagtggtatatactcatggattcagatttcttgtccattcactcttgagctgataccagtaattttcactcctaccactcttccaagattgttgttctcaagtttaccattgatttgtaaatctagacattgtttcttagacctcattttatttaacctgtcagcaatattggacccaatggaaaactctctcctccataacagtgtcttcacttggctttcaggatctcactcactcacctggcttttcttcctgcctttccagtccatctgtcatagtctgttttgctttcttctcatatcccaccttttacacattgatatgtcccaggactcagtcctcaatcttgtttctcatgacttttactaccttgtgtgtgctaatgatttccaaatgcgtgtctccagcctagatctctctccttaattccagacttctacaccaacctgcctacttgacatctctgtttgattggtcacgaactgttgggtatcacaaaaccaggtccaagattggggtaccgatattctttctcatacctacccctcacatggtctttcctacttgcattaatggcaactcttgcagttgctctgctagaaactaaggtgttgtcattgactcccctctctctctgacacctcacatctaatctgtcagcagatcttgtcaggagtacctgaagaatatatccagaagccagtcatatcttccatttccaagccaccaccatctgctctctagatgcatgtaatagactgttaattggtctgttttttttttttaaagaaacctcttttcattaatccttaactcagtggcacttaaaacataagtcagatgatgtcattcttctgctcagatccatctgattgcctcccatttcactctgagtatgtgtcagggttcctcctcatacctagaaggcaacacacaatatgccctgttctctctctcacttaaacttctgtttcttattccctttgctgtgcttcagctacactaaacttcttgctcttcgttatctatcacagttgcttaaacaccccaggcacacctctgcactgggcagttccctgtgtctgggatgccttttcctcagatagcctcctggctttctttttccattccttcagttctttacttaaaagcccctttctcagtaaggacttttctggccatcctagaattcccactatccctcctctcaaacctgtaaacatttcattttcctgctttagtttttctcctttaacactgtatattttgcctaatctatctatggttattgtgtttatttcactcccatgagtaggatgtttgtgtgcctagaaaagggcctagcttgcaataagtagctactcaataaatatttattaaatgagcaactgaagtttacccttcggtgtattgttttaaacattagattgattctcaggtaaaaaaaaaaaaaaagaaagaaagaaaaaggtttcacatgggttcattctaacacttttgcctggaaattatatgcgtttttggattttttggctctttgtaataagctacattctttgtattaatagttttccatttagagagaaaagctcaatattgtcattactcactatttattcttttactaataatcatgatagttttacttatgataaaatggatcaaaggaattacatagttcattggtaatttataaagaaaattaaaatataagggtggtaaatttaatggacttaaaattgtttccaattgattatgaaccttcagtatttgaagttaaaagaccaagttggaatgtgttgctttctataagagagctatgctcatcaggcactctgtattctgacagagcagctgttgatcttacatagggttgcgggaggagcggacttgaagcattggcagactctcagcggcataagagggttaacatcatcttgagaaacatggctatctgagtgaggctgctgtgggttggttaacactcccaggcttgtggattggagcgagtttgtgtttaattggctgtctttccaaagcaagtggcgcacgttgatattggttggtgagagaggccaatggtcactgatgattgactgtatttacaactggctgtgggtggttgcttgttacaaatgtagctactaagtttgagacaactttaaactgcagttttctgtttaaaagttgccttccatcaactatgtttaaaatgaaaatgatttcatattccagaactatagacttaatttggaagtgtgggtcaagaggaattgtttaataattgctctcaggaagatctctttttttgatgcttagtcttaaccagaagaattcgctacatagttaaaaaacaagcaaacaaacaaacaaaaaacaattattaattttgtttcagtttttagtattttcagagacttctgctaaactcctaatctccagtgggaaatgtttgtctctttgttaatgtatgtagttatatgatagtgatattcttttttttattccttaatctttttttgttcactttctcttccatgcaatgatagtgatataatgtgtgtttacttcataaaaaagtaattacaattttctgctggcaaatccagctttttatattaagactaagtactagactaaatatgtgggaaatttaccaaattattttattttcaaacaagcatataattaatcagaatattgctatttttgaacaatatataatgactataatgacatttaggaattttaacactaagatttttttcttcccgagacatttccttgatttctttcatgtaatatgtgcctgttatttttaagacttggtttaatctgtttaaacattattatatttaaaaacaaaacccaaaacatagcacagatctaaatatgagtttcatgtgtgagagtcattgcctgtgtgcagtggattccagctgtttttttttttttttttttgagacgcagtctcgctctgtcgcccaggctggagtgcagtggcaccatctcagctcactgcaagctccgcctcctgggttcccgccattctcctgcctcagcctcccgagtagctgggactacaggcacccaccaccgcacacggctaattttttgtatttttagtagagacggggtttcaccgtggtctcgatctcctgacctcatgatccgcccgcctcggcctcccaaagtgctgggattacaggcgtgagccaccgcgctcggccagcttttttttttttttttcttttcttttttctttgtgacagagtctcactctgtcaccaggctggagtgcagtggcaatctcagctctctgcaacctccagctcctgggttcaagcgattcttctgcctcagcctcccgaatagctgggactacaggtgcgccaccatgcccagctaatttttgtatttttagtagagatgggtttcaccatgttggccaggatggtctcgatctattgacctcatgatccgcccgcctcagcctcccaaagtgctgggattacaggtgtgagccaccacacccagctgactccagctttttagtgtggcattcatcttccattcttactttctttgtgttttacacttttcctttcaagttcctaggaaacacctagactccatgggactaatctttgtgctgtcattccattctccaagtggagtagttttctctattttttccctggtgagctcctcttatattttgcctcttctgtaatgccttccttgtgctaaaatataactttccatatatcaactcttaaactacacattgtatcataattgcatattacctggtttttgaggcaggaaatatatatttctttatatgttgataattcataactgtgttttttgaattaatgaattgagatggggaagagttggaattttacaaaattttttttatttgttatcagtagaattattataaaacattggccttttgtagattttttaaagttgtggttctgcgttacatatgaaggaagtaaagaaaaatgaaaataaaaaatgtacctcaaaataatctctgattacgccagtgtttgagaaggtaatttagtaacttgtggtctgctgcaaggagatgatgacagcagtttaagtgaaatagatgaggttgaaagaagttaaaatgtataagttctttatttctctgagaaggaatattcccagtggttactttttctggaaatagaaaatagtgtagtctgccaaagctagagaatactcaactatatcaatgctgaaagactgattatgatgagggctggtaactttgacaaggagcagtttgaataaataattgctgtggaatcctgactgtagtggataagcatagataccccttgagggaaccgttattgggaaaggcaacagagaaatgagtgataactgaagaagaatgtgggattcaagggaattttctttcttttttatttcaaaatagaagcttttagagtgtgtttgtatgctgctgggaatgatagggacaaggataacatgtttatgagatttaattttgtatgtctaagtgtttgaaagctcgattcattatcttttgtaggtttttagcaaactaattgtccttaaagtgtttattcacgtagagttttatggtaagagtttgttccttcagcattggttcagaaatgtaacatattagcataactgaacctgtgaatggtgacctaaaatttaaactatcatatgcagattgtttttaattgtgaaataataaacatgcaaacacttaggccatactgaatagaatttaaacatccctgatgaataggtatgatctgctgaggtactctaaaatgtcaggagtatcaactttatagttgtttagattctggggagaaggggagggttttgtttaagtactttagaaaagctaactgttgacaatctatcagattattacttctggattataaagtgtttttttttttttttttgagacagagtcttgctctttcacccaggctagagtgcagtggcacaatcttagctcactgcaacctccacttcccaggttcaggcgattctcctgtctcagcctcctgagtagctgggattacaggcgcccgccaccgtgcccagctaatttttgtatttttagtagagacggggtttcatcatcttgggaaagctggtcttgaactcctgacctcgtgatccatccacctcggcctcccaaagtgctgagattacaggcgtgagccactgcacctggcctataaagtttttttaaaaaatatttaatcaagttgacctacaatggattataaagttctgaagtatcaaaaccatgtttccctggaccaacattgccatcagcatgtattgtgtgctcaatgagtatttatttgttgaacgggtgaatgaatgggtgaatacatgaatgaatacctgttgatggatttcattaaaaatactttttagttttttgaaagtaggtttctaaacttgcctctgtataaagtttttttattagaaaaaaattgcaagattctgacattatttatagttgtagtcagaaatggaatggcaatgtgggttcatctgctatcatctctctttaaaacacttgaaaataaatgttaccttcacagcatatcatgaagcacatgtttttgaggcagaattcttaggtttgagttctgggtctgctactgaccagctatatgggctgaggacagtcacttggcccttctgtgcctattttctttctttataaaattcttaatatgttactgacctcacagaattgttatgaggattatatgagtttgacacatggacagtgctcagaatgatgcacagtacctgcatagtaagtccagaaaaagcttactaatatcatcattaaaaaagggtttcccttatataagaatgtgagtaatattttccaaataggttttagtgcccgtaaaagcttgtttttattgaaaaggacaacaatgagaagaccctggtatatttatttttatcacgtaatgcaggtaacatgtttttttcttttggttttactatgagaaatcttgacctaaatttaattctttgtaattaaattagtagtagtaaatttctttatcccttaatgttgctgtttctgtttatagtttaatgtccattgtagaaaattactgcattttacattacctgtaaaaaaattacctatacacttgatgaatagaagtaacacaaatgcagacattttatatgataaaacagtagtgttagatattctttgtattttacatctttgctatttttctaaaaggaattgtttttttttttcaggcctgcagataaaacatctaatgaaaagaacgaggtattgtaaaaaaggaaatgatctaaaatattgtttttaaaaaacaagttctaaaaggtaaaaatgaaaaaaataagatgttttgttgtaaggctgtttgcttagaaaaagtgatgaagaaacagtaaccgttgataatggtaccttttaagaacaatctgttgctttaagaagtacctgtatttttgctcatacaaaaaaaatggagaaataccgcttctgtacctttagtatatgctataaatctttcgaggacattttgaaacagtattatttatcttataggtcaaaaaccaaatatatcctgaggctgactttgctgactcaatggagccatctgaaatagcctcagaggattgtgaattgtctcactctgtttatgagaattttatgttgctgattgaacaacttagaatggagtataaaggtaggaccactgcataaatgcaaggccttttgatgtatcctgcagtaatgtgtgtatacattgctgagaactgacgtgtgatagtgaagctcatctcagaaatacgctcagtgttaaaatagagaactaacttatactctacgccaaagagctatgataactccactgtacttttctcagtgtgagtggcattcccagtctttttgttgactctttctctcctattccttcccccaatgtcaggttaccatttttttctccacctggaatgctgcgagaatcttaggaatcttagaactgttttcccaaataccccacctcctaaaaccatggtctagtctgcaatcataatgataaatttttaaaaattcggatctgatcatgttactcctttgcttataactcagctactgcttcttattgctataaggttagagatctgaatcctctagctttatcctgcatcgtttttactcttctctttctctgtgtcccactctgtgtcttatatgtttgttccagcactgatagcttcagtgaggtataactgatatgtgatagactgcacgtatataaaatatacaatcgtgtgcacatttgaaaccaccataatcaggagagttaacatgttcatcatccataaaagtctcttcttgtccctttgtctttctttattaagaaactgctaaattgttttccaaagtatttgtattgattttgcattccaaccagaggtatacgacatttcttgttgttctgtatcatcacaagctcttattattgctgtttttaaattttgaaattttagccattctgatggatgtgtattatgcatatcattatggttttaatgtgcattaccctaaggactaataatgttgagcatcttgtatatgcttatttgccacctgtgaactgtcttttccaatctgggtagcttatgaacatttaaaattgagattcgattcaatcagcttttttacatacaccaaagatagtcaaaccttttcattttcaaactgttatcttactaaacatagtaaatattttaaacttgtgacaaaatggtctctgtcacagccaatcaactctgccattgtagtatgagaccagccatagacaatacatatgttaaaaaacacagctgcattccattaaaactttatttgcaaaaataagaagctgccccgcaggttggattttacccatccctattatgtgatcatgattgtgaataaagacagttttacttcttcttttcaactcaggtagcttttatttccttttctttcctaactgcactggcttcagtgcaatgctgactaaaatagtgaaaggagacattcctgtattgttcccgatcttacagggaaagcattcagtttttcatcatgacacatgttagttgtaggtttatcagagatgctctttatcatgctgatggtgttcccttgtattctttggttactgagagggattttttttttaaatcaggaatgaatgttgtattttatcaaatgcctctatctactgagatgatcatatggttcttttagttttttaatgtggtgaatacttatattttactgtcaaacaaaccgtgtatttagggataaaccccacttgtttatgatgtattatccttctaatgtatcattggatttgatttgccaaagctttatttagagcgttttaaaagactattttttagagtagttttagcttcacagcaaaattgaaagtaaggcacagagattatccctgtactccctgcccccacacatgcatagcctccacaattatcaatatcctcaccagagtgctacacttgacctcattgatgttcctgaattgataatcataatcatccaaagtccatagtttatattagggttcagtctcggtgtcttatattctgtgaatttggacaaaagtataaggacatgtatttatcattgtagtattattcaaagtaatttcagagctttaaaactcctttgcgcttcatctgttcatcttttcccaccttccctccccaactcttggcaaccactgactttttttactgtgtctatggttttgccttttccaaaatgtcatttagttggtatcagacagcgtgtagcctttagactggcatctttcacttggtaatatgcctttgtggttccttcatgtcttctcatggcatgatagctcattatcgcatggctgtaccagaagttgttcactcacctaaaggaggatatcttggtttcttgagaaactggttacatttttacgtccatgttcatgagggagttttctctttttgtaatatcattgtcagactttggttcagggtaatgctagagtgacagaatgagttgtatttctcctctattttttttttgagggcgggggagaggtcatataaaattgttatattgcttcttaaatatttggtagaattcaccagcatagctatctgggcctggagttttctttctaggaaggctttacttatgctttcttttatagatataggacagttcatgttattccttcttaaattggaccttggtaatttttgtttttcaaggaaagtgtccattttatcaaagttgtcatgtttagtcacataaagcttaccttattatatttctattcttttagtatctgtagaatctataaaaatgtcatattactatgtttctgaaattagtaatttgcatcttcttttttatgatcaacctggctagagttttatcacttttattgacctcctcatagtgtgtggttttattgatttttttcctattgtttttccattttattggtttcatctttgatgttttggtctgttccgcctgctataacaaaataccatagactgggtagcttataaacaacagaaatagatttctcacaaaagtccaagatctaggtgctggcagatttggtgtctggtgagtgaccaattcctggttcatagatctcttttttccccctgtgtcctcacatggcagaacaggtgaatgagccctctggggtctatatatataagggcactaatcccactaatgagggcttggctcccatgagctaattacctccacaaagcctcaccttctgataacatcacctctgtgattaagtttcagcatatgagttctgggaggatgcaaatgtcagacaataccagatgcttattgtatcatttcctctgcttgctttgagtttaatttgttcttcttctttttcagtttcttctctttttttagtttcttaagataaaagtcaagaccattgacttgagagtcttctaatatagacattaagtgctaaaaaattttaagtactgttgtagctgtgttccacaaatcctgatatgtaatattttcattttcattcagttcaaaatactctctaatttctctttgcatcgtgtctttgacctagggttatttagatgtgtattactttgttttaaaatatttgaatattttgatgagatattttgttactaatttgtgacttgattgccatgtggtcagggaacatactttgtatgacttaaatctttctgacttaattctttcattaagattgattgcaggccgggtgcagtggctcacgcctgtaatcccagcactttgggaggctgaggcggatggatcacgaggtcaggagatcgagaccatcctgaccaatacgttgaaactctgtctctactaaaaatacaaaaaattagcagggcgtggtggcaggctgaggcaggagaatggcgtgaacccgggaggcggagcttgcagtgagccgagatcccgccactgcactccagcctgggagacagagcgagactccgtctcaaaaaaaaaaaaaaaaaaaaagattgattgcagaacctagaatgtggtctgtttggtaagtgctcactgggtacttgagaagcatggtgttgttcaagtgtgctccattcttgctgatttgctgctcccttgttttatcacttattgagtaagtgatattcaaatctcagatgtacttgtgaatttgtctatttcgtctattgatttttgcctcatatattttgaagctgttattaggtgcacaaacagttgagattacacgttcttgattaactgaattttttttttttttttttttttttttttttttttttggtatttttagtagagacggggtttcaccatgttagccaggatggtctcaatctcctgacctcgtgatccacctgcctcggcctcccaaagtgctaggattacaggcatgagccaccgcgcccagccgattaactgaacttttaaaagtcattaggaaatgactgtttatagctggtaattttttttttttttttttttttttttttttttgtgtgaaatctactttggtattaacatagccatttcttctcaggcttcttttgtcaactcttagcctggtatatctttttccattcttttgaacaatttatgtttttacatttaaagtgcttttttttaataggaagcatggagtaggttcttgcctttttatccagtctgacaatctgccttttaattgagacttttaggccagttccatttataatgtgcttattaatacagtgaaatttgtctgtcatcaagctgtttgatttccactggtccccccagttctttgttctcttctttttctgctttcttctcagttagtccagtaatttttatgatttatttttatctcccttttatggcttattagcgataactatttttttctatcttagcagttgcactacaatttatagtatatgattttaacatcacagtccatcttcaaaaaatattatggcatatcatatatggcataagaaaattatgaatgaaaacccaaacattgtatgttctcacttgtaagtgggagctatgctatgaggatgcaggggcataaaaatgatacaatggaggttggggacttgtggggaaagagtgggaggggggtgagggacaaaagactacggattggatccagtgtatgctgcttgggtgatgggtgcgccaaaatctcagaaaccaccactaaagaacttattcatgtaaccaaggaccacctgttaccccaaaagctattgaaattttttaaaaaagaaaattggaatagtatactttcatttcctctctcccagccagatacttctggatttgtaggattatagttttctttacatttagaaagttttggccattctttttttatttttctgtctctctttttccctctttggggacttattcctgcttgaagttttctcatagttcactgatgtctcaaatttatgaatcttctctttggtgatgtctaatctgtgttcacttccatccattttagctttcattcctgacattgtaatttgaatctctacaagtgtagtttgctttaaagaaaaatcttccggccgggcgcggtggctcaagcctgtaatcccagcactttgggaggccgaggtgggcggatcacgaggtcaggagatcgagaccatcctggctaacacggtgaaacaccatctctactaaaaatacaaaaaaaaattagccgggcgcggtggcaggcgcctgtagtcccagctattcgggagcctgaggcaggagaatggcgtgaacccgggaggcggagcttgcagtgagccgagatcaagccactgcactccagcctgggcgacacagcgagactccgtctcaaaaaaaaaaaaaaagagagataaaaaaaaaagaaaaatcttccatgcctctgcctgtctgcttgagcttaattttaatatacagttgagttccatatgaacagcttgatctttctgatcttgcttttatgatttggtctaatttcctgctcctgaggcaagatctttgtgatgactctattcattgccatgcgaagtctcagttttcccagcatcactcatgggaatggacactctttttggcacatcgtgaacaccagacatgtttctttccagtgttttttagatgtttttttccccttgatctggggcggttttctggcacacatgtgctgtttgttactctgctagatactcaggaggtatttttgcaaatcttcagtgttctttccctgtactctgtctcctttccggtgttctgtttcgtgatctctgtctgccttggctttaccagactctcagcttcatcatctcatctcagggaatctggtggactctatgtcagttttttctctctgtgcggtagcctggaaactccgtgaaggcagggagctggagtgttggatgaatttcctttgtttcctgtcttacggggatcattgtcttcattacctgaagtccactgcctggtaaatcattgtataatatattttgtctgttttctttttggttgtttcaggcaagaaggtaaatcagtacttgctgtccattgtggccagaagcagattccagcagagcttcagcacctgctgtcgactggcaagaatgcttttctacccctttgcttaactgcttccttctcacccttcatttctcagtgtagccatctcttcctcagggaaatcttccctgggcccattatagatcaaattcttctgtgtgatcatagaactctgttttcttacaccacatatctgaatttataattgtcatttttgttgtgtttgttcctcacttcacttaaggctaaatgagagtagaggtcttatctgttttatctgcagagcttagtagaatgtctcccactttgtaggcactcagtgcatatttgttcaatgtatgaaggagacaatgttaaaaatgcacagttttttaatacctaaaagtactcatatattttatttctaccttttctccctgacacagattctgctagcctaccaagaatccaagacacattttgtttgtgtgaacacttactgaaacttaagaataatcactgtgaccaacttacagtaaaacttaaacaaatggaaaatatggtcagtgtactacaaaatgagctatctgaaacaaaaaagacaaaattacagttagaacttcaaaaaattgaatgggagaaagagctgtacgatttgaggtatgatgttctagttctaaagaaatgtttatactaaagacaatatatcagaatttttgtaactgctgacttaccttctgcagaataatgggggagaaacctttttggtcttgtggaatatgaaattcttggaaataataaaacaaattattaactgtgaactcttctaataaataaatgtgtattctttgcaatctaaatggccatatagaagtccaccatataaaatcttgttattcatttaacaaattgtaatttgggttttaaaattatcttgtatttataattaatgatgtaaggaacatcttttatcgttactattatttgtagacacagggtctctgtgcctgggactggagttcactggtgtgatcatacctccctgcagccttgaactccatcctcctgcctcagcatcctaagtagttgggactccaggtgcacattctcatgcttggctaactttttaagtgttttgtagagacggggtatcactgtgttgctcaggatgatctccaattcccaacctcaagcattccttctgcaaaattggcctcccaaatcattagtatgacagacatgagccgtcatgcccagcccagaacattttttatataaatgtttttctacattcctaaactgtttgctttgaataaattctccaatatagaattattggttgaaatataggaactttttaaaaagacctttgatcaatatttcttaatttttcacaagaatgtttgtgttaatttatagttcaagcaacagagcatgaactggtcacttttctaaacccaaagtaattttcaaaaaatttatacagttttattctttttgaaaaattttttttaaatttcatagctttaggtatacaagtggttttcggttaaatggatgaattgtatggtggtgaagtctgggattttagtgtgcctatcacccgagtagtacacattgtacctcagtaggtagtttctcatccctcatcctcctcccacactctcccacttctgattctccgatgtccattatactactgtgtctgcatttgtgcacctatagcttaactccctattatgagcgagaatgtggttttatttggctttccattcctgagttagttcacttagaataatggcctccagtcccttccaagttgctgcaaaagacattatttcattcttcttatggctgagtagtactccatgacatatatataccacatattatttattccattcattggttgatggacccttaggttgattccgtatcttcgcaattgtgaaatgtgctgcaatagacatacgtttgcaggtgttttttttgatataatgatttcttttcctttgggtagatgcccagtaggggattgttggattgaatggtagctctattttagttgtttgagaaatctgtctactgtttttcatagaggttgtactaatttacatttccaccagcagtgtataagcatttccttttcaccacatctgcaccaacatctattgttttttgactttttaataatgagcatgctggctggagtaaggtgatatctccttgttgttttagtttgtatttccgtgaatgttagtgctgttgagcatttttaaatatgtttgttggccatttgggcatcttcttttgaaaaatgtctgttcatgtcatttgtgtactttttgatgggattatttgcattttcttgctgatttgtttgtcctttgtcagatgcatagtttgcaaatattttctcctattctgtaggttctcttactctgatgattatttcttttgctgtgcagaagccttttcttttcttttcttttgaggcagagtttcactcttgttgcccaggctggagtataatggcgtgatctcggctcatggctacctctgcctcccgggttcaagctattctcctgcctcagcctcctgagtagctgtgattaaaggcattgccaccacgcctggctaattttgtatttttagtaagacaaggtttctccatgttggtcaggctggtcttgaactcctgacgtcaggtgattctcctaccttggcctccgtgtcactgcactccagcctgggtgacagagcgagactctgtctcaaaaaaaaaaaatatatatatatatatgaattgtatggtggtgaactctgggattttagtgcgcccatcacctgagtagtacatattgtacctcagtaggtagtttcatatatatatatatatatatatatatatacacacatacattttttgtttttttttggtagagatgaggtctcattatgttgcccaggctggtctcaaacttctgggctcaagtcattctcctgccttggcctcccaaagtaccgggattacagatgtgagccacatgttaggcctaatccatcttgagttaatttttatatatggtgagagatagggatccagtttcattcttctacatgtggctattcaattttcccaacaccatttattgaatagggtgttctttgcccagtttatgtctttgtacgctttgtgaaaggtcagttggttatacatatttggctttatttctaggttctctattctgttccattggtctacgtatgtacttttatacaagtaccatgctgttttggttactttagccttgtcatatggttttagatctggtaatgtgatgtctctggcttcgttctttttgcttgggattgctttggctattcaggctcgtttttgattccctgtgaattttaggggtacgtcctctaattctgtgaagaatgacagtggtatgttaataggaattgcatggaatctgtagattgctttggttaatatgatcattttcactatattgattcttctaatctatgaacatagggcatatttccatttgtttgtgtcatctatgatttccttcagcagtgctttctaattctccttttagagatctttcacctccttggttaagtatattcctaggtttttgttgttgttgttgttgttgcagctgttgtaaaagggattaggttcttgattagattctcacattggtcattcttgatgtttactagtgctcctgatttgtgtacattgattttgtaacatgagacttttactgatttcattgattaaatctaggagtctttagggttttctaagctaaaacagagatagtttgactttgtcttttccaatttggatgccctttatttatttctcttacctgattgctctggctaggacttcccagttttattctaaatatgcacgaaataagtaaaatggacagtaattgatgattattttattccatatctctcatatgcagataaaattaattccaaattcattgttgaaacacatattatcctttacttttaaatattagatcctgtcttgttccaaaaagggattttaaaattggtgatgaaatacttaagaatcaagaagataagttgaaagtgttacccaaaagagaaacataaaaaggatggggtaacagttatagacagcttaggctagtcttggattatagtaatctgcagatacatggtgtgtgaatgacatctgaaggtgttatcttacactgtaaatcatttttatgactacacatatactatttcatgaagatgaaaatgcatttctagtgaatttctaaacttgtttgtaaacagtaacttcttttaaattagctaactctaaatgatctgttctaattaattttcaacttgcataacgtgaaaaagaagtaattttcaacttgtaactttactgaaaaatttcaaatatgcttttccataatatttaccagggttactagtaacagaaacttaccagttaatggaatatttctttcctcactacctctcaaatatatatgtcccttggaagagatcgaagtgagaaattaaaaacatgagaactagaaaggaaacaagagcataggagtttttatgaggataataaacccacatgggaagagccagatcacagaataaacttttttattttttaacaaaacacattttaatgtaatccatgtttaactgcagacttgccttaaaacaagaaaatgaggagaaaagaaatgccgatatgttgtataataaagatagtgaacagttaagaataaaagaagaggagtgtgggaaagtggttgaaacaaagcaacaacttaaatggaatctgagaagacttgttaaggaattgaggacagtaagaaataacttggatctggtaaattaatctttggtgtaaacttcatttttctaactttatgtttcatcggtattacttataattttttgccttcatgtatatcatttaggtttaaaataaaccaaaactgttatttcctcttaagaatgaactatgacatttatagataaaattatttactgtaaaccttgtcatctaatagatgctcagtctgtgtttttagagtggaggataagttgagtttaatcactaatatagctgttcatttacacattttttatgttaaaatacaggctaaatagctttgaaactataaggacactagttaaatgttttgaaagaaattttatttcacaatgctgtatcttctcgtagttaagaactgtttttcctctttgacagatttagctgtcatgtatgcaattaagatttgagtgattcttgagggataaaagttcttgtgttttaacaggctacttctttttaaccgttttataagagaggctctgctcttaaccttttagattttctttttcagtgctattagaccaaaacctccatgttatctctaggttgtgcaggagagaaacgatgcccagaagcaactttctgaagaacaggatgccagaatattacaagatcagattctgacgagtaaacaaaaggaactagaaatggctcgaaagaaaatgaattctgaggtattttctttagtcattttcaaatatatttttgtatgtgaatatatttttaaaaaacaactctgtgcaacttggaaagtacaatggatttttgaactacacacacacacacacacacacacacacacatttgggggtggtgatggtggttctggcatttttggctcattgaataaagtcatgttcttaattcaactccatttgtttgcaagagtcaagtagtgacattcacagtggccttatccaaaggagaaacatttgttatttttcatagaattaatgatctttccacaatctcaaaatccttgctactaacaacagacgttctagttttcagacattatttcatcttcctaatatattaatggagaggttagattattatttccacttgtagtaaggatgaaatgtatagccagttcagaggccgtacttcagatgccgtttcccttacttttgaggagagtaacagtttgctccaagtagcgtctcatttcagtgcaaagagctttgaaaacaatgatatgccataatataaacttggtgataatttattggtaagtgttttttcttagaaaaatagttcagtgtgtgggagactgaggcgggtggatcacgaggtcaggagatcaagaccatcctggctaacgcggtgaaaccccatctctactaaaaatacaaaaaaaattagccaggcgtggtggcgggaacctgtagtcccagctactcgggaggctgaggcaggagaatggcgtgaaccctgggtggcggagcttgcagtcagccaaaattgggccactgccctccagcctgggtaacagtgcgagactccgtctcaaaaaaaaaaaaaaaagaaaagaaaaatagttcagtgtatttcaccctgtttcatgcttatttctgtttcagacattataaagaggaaacttaagttattgtaataacagataatctcatgattttctaagaaaagctctgtaacttctttttttaccactggtgttttgaaataagcctcttttatatttatatatacacaacacagaagtaattgtggtttggtggaagagcactagaagtaaagtaaggggacctagggaaaatcctgcaacttgcatattttttgacctctcctttcagaattgtgtataaatgagttcagtgatacatgtacaagtgcttggtacaaggccaggtgcagtggctcacgcctgtaatcccaacactttgggaggccgaggtgggtggatcacttgagcccaggagttccagaccagcctgggcagcatggcgaaaccccatctctacaaaaagtacaaatacatttagctgcgtgtgggggtgtgtgcctctagttcagctacccaggaggctgaagtgggaggatcacctgagcccgggaggccaaggctacagtgagtcttgattgcgtcactgccctctaacctgagtgatggagtggagaccctatctcgaaaaaaaaaaaaaaaaagcctaatataatgcttagatttagcatttatgaataaatgtaattcttatataactgatgagaaaaatgttagaaaaataaatagctatagaatattctcaggaaaaaaagaacttaaagaacgttggaacatttcctctgtccagatatatgcaaagctacagcttttactatagggtggtgtataggttagatgtcagagtgtaaagccaattttttaatgtagtcaaatttattaatctttaatgcctttgagtttgttgtaatttggagaccgtcttttccaattctgagatgcttaaaaattctctagttatttatgttctacattcatggattcattgtcttcaaataaacttatgaagttttgggaatttatgctctatgaggtttgaagtttcgatagaatatttttttccagttggatatccacttatggcaatcttttcattgtatacattatttaatttcagagaaaatcataatctgtcattttattgagtgctactgaatgtttcctttcttacttagatttctcataggcatcagaaagaaaaggatctctttcatgaagattgcatgttgcaggaagaaattgccttgctgagactggaaatagatacaataaaaaatcagaacaagcaaaaggaaaagaaatattttgaggacattgaggctgtgaaagaaaagaatgataaccttcaaaaaattataaaactaaatgaggaaacattaacagaaacaatactccagtacagtggacagctgaacaatctgacagctgagaacaaaatactcaattctgaactggagaatgggaaacagaaccaagaaagactagaaatagaaatggaatcataccgttgtagactagctgctgctgtacgtgactgtgatcaaagtcagacagcaagagacctaaaacttgatttccagagaacaagacaagagtgggttcgtttacatgacaaaatgaaggttgatatgtctggcctacaagctaagaatgagattctttctgaaaaactttctaatgctgaaagtaaaattaacagcctacaaattcagctccataacacaagagatgctcttggaagagagagtttgattttggaacgtgtgcaaagagacctcagccaaacacagtgtcagaagaaagaaactgaacaaatgtaccaaattgaacaaagcaaactgaagaaatacattgccaagcaggaatctgtagaggagagattatctcaactacaaagtgaaaatatgttgcttcgacagcaactggatgatgctcacaagaaagctaacagtcaagaaaagacaagcagtactatccaagaccagtttcattctgctgccaaaaatcttcaagctgagagtgaaaagcagattctttcactacaagagaagaacaaggagctgatggatgaatataatcatttaaaagaaagaatggatcaatgtgagaaagagaaagcaggaagaaaagtaagtattaagaaagataaaatatttttcaaccttcctgaaagaaaatgtaaagtaatatttggttatggctaaatgttgtatctagttgaatataaaatgtatagatcataaatgtacttgctgtatcagcctagaaatgtaccagtgaaaaagaagttaaacctgaaagatgctttactttgcataaagaaattgtgtcacctatgaaatttcaagttcagttacagtgttaataggtacagactaatactcatgatgtagtcttatgctgctgaaatgatcattgcaatgcctttatgtggccatgttttaataccatgatgaagcagataaacagaaatgctcatacctgacatgagtattttgaaattaagattcagtggggagggttgctttgaccgttaattccagatttcccaggtgaactgaagtatactgctgtatctcataatacttttccttcagtaattttgtaatgtatttaagttggtataattttatttttattcatatcaatttgacttaaatctgagacgatttcagtctcaaattacttgttatgacctctcaattctttaaaggcatttactttttttttttttttttttttgagatggaattttgctctgtaagttttgtatttttagtagagacggagttttgccatgttggcaaggctggtctcgaactcctgacctcaggtgatccgcccgccttggcctcccaaagtgctgggattagaggcatgagccactgtgcccagcctaaaggcatttactttttattaaatcataatttgggacagatgtgaatttcagcaaagccatgttacatttaatcttaccactggtgtttataatttactttgaatgtttttacaaagaatttgctcataattttcatttcaaggctcactgcctatcattcggatataactttgatagtacaaaggtaactgtggctatctgtgatttatttgtttggcactgagtcccattttcaaactaatcagaagtggcaggattcacatatagcaggaatggactgaatcggtgagacagttgtaggagctgagatcaggagggaggtagaggccaggttacctagggcctcaaaggccattggaattttacttgtattgtgagataggaatcttttagaaggatctgagcaggcaattgaatatgcaaggaactctgaggttgatttgagcttctaataaaaaacagggaaaacattttaccagtgtgggatgtaccaccagcagccccacccacgtaccaaattctttttgagacttcagtaggttgttaagcactgcagatgtttcagggaagagtgagtagtgggctgaatctattgcctaagttaacagaaaaccgatttggcaggaagataacaccttctttgtccttaactaaattcagtaataaacaagaatgtgtgcacatgaggaaaagaaggcgaatcatatatgtgttgatgtttttcaaagtatatgagttagagttaaatcttttttttttttttttttttttgagacggagtctcgctctgtcgcccaggctggagtgcagtggcgggatctcggctcactgcaagctccgcctcccgggttcacgccattctcctgcctcagcctcccaagtagctgggactacaggcgcccgccactacgcccggctaattttttgtatttttagtagagacggggtttcaccgttttagccgggatggtctcgatctcctgacctcgtgatccgcccgcctcggcctcccaaagtgctgggattacaggcgtgagccaccgcgcccggccagagttaaatcttactaccataatttaataataaggtgatttataaatcagtaacaaaaaataccttcacaggtagttatgagagaattccaacaagaatggaccgatctcctaaaacaacaacctacgtcagaggctacctcacgttgtcacattaatttagatgagacacaggattcaaagaagaaattgggtcaaatcagaagtgaagtatgtatgaaacataacatgtcaacagttaatctataggtggtgaaataatgtcagatgttttaggatactgattgcagtggatagctttcttttgtatttttattataattcattttattacaatttaattatctttataatacacttgtttcttaacctctggctttcattctgtctttttctcctcataagtacatacattttaaaaataaggatcatttccaaagatccttaggaaaattgggaattattcagtattcctcacagaagttgagaggctttttttttcctgtgaagtagtatttttttagtgatttctctattgccatggtgaggcaagccagattaaattataggataatgtttaatagaatgttccagaaaattgtcttatttcttatcttttgtgaatgggtacagaatctgtgtatatttatttcatgaatttcaggataactggtacagaaaggccatagtactgttctccaaaatgcaaatgttttaatttacaaactacttgaaatgttaggtacttcctttattttcctttcattttaaatatattgtgcttttttacaaatcatgtatagtatgtacatccaaagtagagaattaagagatatatctagattctaccactgaatttttaaaaacaagtttactgagagagaattctcataccatacagtttacccattgaacgtgtacaattcatggtctcttaatatattcacagagttgcataaccatcaccatcatcaattgtaggacattttcatgaccctgaaaagaatcagcaatctattttgtttccatagattagcccattctggacaccacgtatcaattggatcacacaatgtgtggtggtcttttgtgactggcttcttctacttagcataacatttttaaggttcattgtgttgtaacatgtatcaatatttaatttcatcttattgctgagtaattttccactgtatggacataccactaatttatttagccattcatccgttgatggacctttgggttgtttccatgttttggctattattaatcatgctgctgtgaacttttatttacaagtttttgtgtttgtatatgtattcctttctcttgggtatatacatatgagttgaatttctgggtcatatggtaacactatgctcaaccttttgaggagctgccagtctgctttccaaagtggttgcaccattttacgttcccatcagcattgtatgagggttctaatttctccacatccttgccaacatttttcatatttttgattgaaaaagaattccaacctagaggtatgaagtggtacctcattgtggttttgattcacatttccctaatgatgaatgactttaagcctctttttatgtgcttatgagccacttgtatatcttctttggagaaatatctgttcaaatcttttgcccacattaaaattgggttgtcctaaatttctgaattttaagagttctttatataccctaggtgtaagtcccttatcagatatgtttccaaatattttcaatggctttcctttttattttcttttttatgatttattatgtttttaaaatttatataattttaaattgtagagagaaggtctcactatgttgtccaggctggttttgaactcctgagctcaagcaatcctcccacctcggcctcccaagtgttgggattataggtgtaagccaccatgcccagcctccttttcactttcttgatggtctctgttcaagcacagaagtttcacattttgatgaagtccagttaatttttttgtttgtttgttttgcagtcacaaagatttatggctatgttttcttctaggaattttatagttttagttcttacatttagtggttctattttgttacttttaggtatgacatttggtgaagtccacctttattcttttgcatgtggatataccgttttcccagaaccatttgttgaaaaatctattcatttctcatttaattttttttacacccttgttgaaaatcagttgaccataaaaatgtgtgtttgtttttggattctcagttataatatattgagctatgtctatccttatgccagtagcaaatcacattttaggaaaattcattttcagtcctgttgcttattaccagttgtcttatgtaagaatagaaattcaagtagtagaatgtctttaatttcactttttgcttcttgaaggagtgtatggccagcttatgccttgctgactccatgacatgatgagagtcaggcttacgaagacagatcccattaattttttttctccagtcataccttttgtctctcacccagtgcctctctcttcattcccatttccatcaaatcttggtcacaggatatgctgactccttctactatttactgcattatgtttttattaactcattgtaagtcatagagtcatgtgtagattttaactatctatgaagggcaagattaagtctaggctgtcatctttcctcattggaaattgagctaattcatcatgttgcagtttacagttagatactcttttgacccagcacctggttctcttgtacactcccggagctgaatcctcttcttggcacagatactacattctcagaaaccagagttccctgcatttacctccttttgcttaaatagagatgcatagctatgcttttatagttcaatacataattcattgaataaatacttcaacccattcaaagaacaacttccaggagtacagcaactggaaatcaggtcatgtccaggcatttatcagaaacaaatggttgaattagttgtatgaatttcaaaatttcagagccaatttttatgatatggagaagcattttgatacaacataaagatgagatgctcttctcttctccatacaaatgagcttgaagtaaggtaaaggggaaattgcatttaatagcttaacactcaaaggacactacatttttacttctgagattgttaaaactgattccataatattttgttaattttctcactgaggaaatggaaatgaagattgaatcctagattgattaataaatatccaaagctgcttattacttttagaatttcagttcattgaaatcaggtacaatgtctgatttttggttattaatcaaatatttctggttttttcaactttatacttcaaattatatatctccttccttcttcatcttccttatttcataactcgggggacaaattctaaaagcctcactggcttagtcatcagaatttgtaatcgaaaggaactttttctaaacttcctctgcagtagttcttacatccttctcctggttgtctgctgcttcccattagagttgtttgtcattaataaattaacctcaacattttttagatcttactttaaaggagactaatttctactgggtatgttattctatttcttgttgtctccttgtttaaatttatttttctggttattttttcctaacaaattacccaaagttgagtggctaagaacaacattcgttaagttcaccaatctgtggcttgggaaaaccttggctgggacagcttgcctctgctcccttcagcttcacttgggataaatcaaaggctgagggactggaatcatctgaaggtttgttcactaagatgtctgttgctgatggtggctattggttggaactttagctggggcaggttgcccaaatatctacattggaactcctaggctctctttgtggcctaagcttcctcacagcatgggggctggggtccaagggtgagcagtctgcggtagagagcctcttctaacttaatgttggaagccacatggttatcacttttaacactttctgttcattagaagcaagtcactaagtttcacccatagtctgtatataggatgaatgattttgcttttatttttattgatgtatttttttttagacatggtgtcttattatgttacccaggccggccttgacctccatggctcaagaattcttcctgcctctgcctcccaagtagctgagaccacaggaatgtgacaccacacctggcttctttagattttttgtggacctgtataattgaacatatttatggtatacacagtgatattttgatatgtgtaaacaatgcataatggtcaaatcaggctaattaatatattccatcacctcaaacatttaccatttctttgtgttgtgaactttcaaaatcctcccctctagctttttaaatattagctagccaagccaggtgtagtggcacacacctgtaatcccagctgtttgggaggctgaggcaggagaatgacttgaaccccggaggcggagattgcagtgagctgagattgcaccactgcacgccaagcctgggtgacagagcaagactctgtctcaaaaaaaaaaaaaaaattagttaaccatattcaccctacaatgcaacagaacactagaattcattcctcctatgtaactgtaatcttgtatccattaaccagcctctccccatcttctactcccctttacctttctcagcctctaatacccacagttctactctctacttccgtgaacttttttttaaattttagctcccacatgagtgaaaacatacagtagttatttttctgtgcttgaattatttcacttagtgtcacttaatgtcctcatcatgctgtaaatgacatgattttattctttttttatggctgaatagtattccactgtggacatataccacattttctttactcatcaaccacattgatctgttgatgaacatttaggttgattctgtatcttggttgttgtgaatagtgctgcaatcaacatgggaatactggtatccctttgatatgctgattttctttcttttggataaatagtagtgggattgttggatcatatgacacttctatttttagctttttaagaaacttccatggttatactagtttacattccctccacgagtgcataagagttttctttttctctccaacctcgccaggattttttacttctggtttctttgttttttgttttttgattttttttgatagtagccattctgtggtgagacgatatcttatttgggattttgttttcattttcctgttagtgatgttgagtacttttccatacatttgtggacattcgtatgtcttctttttagaaatgtctatttaaattctttgtccacatttcaggggggattattaacaatttttactgttgagttgtttgagttcctggcatattctagatattagacctttctcagatgaatagatttgtaaatattttctcccagtctacaattgttggttgtttccttcactttgttgattgtttcctttgctgtgaagaaacctaattttaatatagctttacttgtgtatttttgtttttatacctgtgcttttttttgcatatgcccgtgataacttagctataaaatctttgccttgaccaatgtcctgaagcattttccatatattttcttgttagtagttttataattttggatctcatgtttaagtctttaatctattttgagttgatttttgtatatggtgaaagatagggacctggtttcattcttctttttacagatacccacttttcccagccccatttgttgaagagagggttctttccccaatgtatgtttttgatacttttgttgaaaatcaggtgtctgtaaatatgtggatttatttctgtgttctctattctgttccattggtttaattttctatttttataccaagaccttgctcttttggttactgtaaccttgtaatatattttgaagtcaggtggagtgatgcctccagctctgttcttttccctcaggcttggcttgtatagtctagcttttttgcagttccatatgaattttaggattgttttttccatttctgtgaagaatgttattggtgtttttttgttgcaagttataaagggcattttatttttatcttattctttctctttcttaactttcagattcagggagtacatgtgcaggtttgttacacaggtatattgcataatgcttaggtttagggtgcagttgaacctatcacccaggtaatgagcatagtacctggcatgtcatttttcaaccattgtccaacccagtcccccttcttatagtccccactgtctattgctcccatctttatgtccatgtgtacccaatgtttagctcccacttataagtgagaacatgtagtatttggttttctgtttctgcatcagtttgcttaggataatggcctccagctgcatccatgttgctgcaaagggcagtattttgttctttttatagttgcatagtattccatattgtatatgtgctacattttcttaatccagtgcatcattgatgagcttctggttttattccatatctttgctgttgtgaatagtgctgcagtgaacattgggtgcatgtgtctttttggtagaatgattttttggtggtgagaagtggatatttaaccaactaatgggattgctgggttgaatggcagttctacttttagttccgtgagagaaacctccaaactgctttccacagtggctgaacgaatttaccattttctccaatagtgtattagaattcccttttcactgtagcagctctgccaaaatctgggttgttgttgcttattttttgactttctagtaatagccattatgtctggtgtgagatggtatgtcattgtggctttgatttgcttttctctgatgatcagtgatgatgagcattttttcatatgtttgctctccacttttatgtcttttttggagaagtgtctgttaatgtattttgcccgcttttatatatttttttaaattcttgtttgttgatttaagttccttataggttctggatattagaactttgttcaatgcatagcttgtaaatacattctttcattgtttaggttgcctatttagtctcttgaatggttccttttcctatgcagaagctcctttgtttaactaggtcccaatttttctttctttttttttttctttaacaaaatttttacttaataaatggttaaaatcgcagtgccaaaaatacattcacatttagcaatttcactgaaaggaagaaactacagaatgcacggtttcagaaagctattttaagttatttacaaataaagtatctaaaactcaaaaacaggctgtgtgtgctatatctcgtttatcccttcccgaacaaaatttctgttatttgggcaaattcttaaatcatgatttaaaccgtaatggttacaaaccacaaacacatccatccaaagactgaaaccatttttatctggtcagtggcaaaactgttgaaagggcaatagttgaagctgttgggttttatatagtgtgaactctgataaatattcctaccaggactaaaacacagcacactttgcaggcatggctgactcacaaaggttgtaacaaacaagaactactcttcactcgacaccatggctcagaggccaccgagaagcacgagtgactgacagctcctctgcttacaaacgaatgaaacccaaagtggatgtcgttctcacagcactgaaagtgcttcaggactcacactgatccaatactaactttcttccctattttacacatatttttctactgtccagtggaaatcattttctgttttggctaaacaacaaatactagtttataacaggaatggtaaaatctgtgagaattctgctcaatttaatacaagatcactactttctttagaatggtttctgcgtgtttctatgtcaccctctgtatttttagcttccagtttcctggtaaggaataagttctccttcccagtcacactcggggtcatttacacgtttctgggatgccctcgctcgtccatggaggccaggtgcgtgcagtgactcactctgcctcttccctcttctcaggaccagtccccgaaccttctgccttgcagatcctcctgtttccgccacactctcgcgctcggaagtgagctcctggatcatacagctgcaaggctggccggtccttgtttgccagtcgctcttttctgggtgctggactgtcgtcacacctctgcgctcttcccagtctctccatggcctcccccggagccccgctgtcctggctccccttcttccctctgtcttggccaggtcctttcccccatctctgctcatcctcactccttctggaaagccggtcaggctcgtggtgagctctgtgcctcctgccgtcatccacatggtgtctttgtgattcagattcttgttcttgagatctctccacatccctgtgctctttatcactgccgctgtgtgacgtctcctggggctccttcagcgagccttccacgggcctggcttttacgactgcaccgggagcacaggattcctgcttgccacctccagtatcaatctcctctcctctttcttttggtttctctgtggttggttcctctcccttttctggtttcttaagaagcttaatccttacttctttctctgcaattttcttctgtttatctgtctctctctctctttttttttttttttgcatctttcttcttttcttcttttttcctcttcccgcaaacgtttattttctaactctctcctccgttcttctcgcttctcttctcgaattctctgcttttctaattttctatttttaatatattccaaaagaggtgtggttcttctagcaatgagctctcttgtcttcgcctccatctcccccagcagagtctcagggttggcactggtcttctcttcctccacacagtaggtttctaaaaacttcttatattctggatctttgctgtcaaggaagatatatccatcaaaacgatctctaaaaagaaggatgtcatcaggattcctaaaattaatgtatgctcttgagtagagatgaggataaagactcaggtcggcggcgaagaactcgaagtagtcgtgtgctggcagcgggcgcagctgctcctccagctgctccttggtgaggcccggaggcaggcggcagatgaccacctgcggggagcgcgcggccgttcccaccggggcggagcgtggacaaggagctcaaaaggcaccgcgtaccgcgctgggaggcccggcccccgcccctccctcctctcccttctctcccttctctccctcccctccctcccctccctcccctctaggtcccaatttttcattttgacttttgttgcaattgcttttgagggcttattcataaattattttcagaggctgatttctaatagtgtatttcttaggttttcttgtaggatttttatagttagaggtcttattttaagaatgtaattcagctttcattaatttttgtatgtggtgatagctaggggtcaagtttcattcttctgtgtatggataatcagtcatcccagcaccatttattgaatagggagtcctttccccattgcatatttgtgtcggctttgtcaaagacccaatggttgtaggcatgtggctttatttctgggctctctgttctgttccattggtctatgtgtctgtttttgtgccagtaccgtgctgatttgtttagtgtagcgtttgtttactgtagtatagtttgaagttgggtaatgtgatgcatcaggcttggttctctttgcttaggatggctctgggtgtttgggctcttttctggttccatatgaaattttagaatagttttttctaatgctgtgaaaaatgacattagtagtttgataggaatggtattgaatctgtagattgctttgggcagtatggccattttaatgctattgatttttccaattcatgagcatggaatgttttgccatttttttggtgtcatctatttggtgtcatgatttttttcagcagtgttttgtagttctccttgtaaccacctttcatctctgtagttagatgcattcctaagtattttgcttttttgtgtgtggctattacaaattggattacattcttgatttgtctctcagcttgaactttattggtatgtagaaatgctatggatatttttacattgatttttgtgtcctgactgaagtcatttatcagttccaggataaattggcaaactctagagttttttaggtacagaatcatatcatcagcaaagagagatagtttggcttcttttcctttttggatgccttttctttctttctttttcctgattgctctggctaggagttccagtactatgttgaatacatacggtgagagtgggcatctttgtcttgttccagtgggcaaggggaatgcttccaactgtttttgttcttttttctttaatttttttctttactattttatagagacaaggtctcactgtgttgcccagcctggtctcagactcctggcctcaagtgattctcctgtcttcgcctcccaacatgctggggttacaagcatgagccagtgcacttagcccccacttccagcttttgcccattctgtatggttttagctgtgggtttgttatagagtggcctttattattttgaggtctgtttctttgatgcctaatttgttgggtgtttttttcatgaagggatgatggacgttattgaaagcttttttgcatcttttgagttgatcatatggtttttagttttcattctgtttatgtggtgaaacacatttattgatttgtgtactttgaaccaattgcatcacaaaaataaagctgacttgattgtggtgaagtaagtttttgatgtgttgctggattttgtttgctgatattttattgaagactttggtgtctacattcattggggatattgggctgtagttttctttattcattgtgtctttgctggcttttagtatcaagatgatgctggcatcatacaatgagttagggagaagtatctcctcaatattttggaatagtttcattaggtttgttaacagcttttctttgtatgtctggtagaaattggctatgagtcagtctgatctgaatctgtttttggctagtaggttttttattactgattcaatttcagagcttgttatttgtctgttcatgatttcaatttcctcgtggttcaatctttgttggtttccaaggatttatccatttctcctagatattctagtttgtgtgtatacagtggtgttcattgtagtctctgaggatcttttgtattactgtgggattggttgtaatgtcgtctttgttgtttctgattgtgcttatttagatgttctctgttatttatttatttatttatttatttatctagctagtagcctgtcagtatttttatcccttcaaaaagccaacttttggtttcactgatcctttgtatggatttttgggcctcaagttttctcagttatgctctaattttatttatttcttttctgttgccagctttggggttattttgttcttgttttttagttcctctcggcgcagtgtcagattgttaattacagatctgtctaacttttcaacatatttgttttgcactataagctttcctcttatgctgctttcgctgtatcccagaagttttggtatgatgtttctttttgcttattacaaatcattgtttgatttctgccttaaattctttcttttcccaaagtcatttaggagccagttgtttgatttccatgtaattgtgtggttttcagagatcttcttggtattcatttctatttttattgcactgtggtccaagagaatggtgttgtgtgatttcattttttaaaaatttatcatgacttgctttatggtcaaacatgttgttgatcttggagtatgttctttgtgcagatgagaaaaaagtgtattctgtagttgtttggtggagtattctgtagatgtctgttaggtccaattagtcaagtgttaaatttaagcccagaagttctttgttagttttttgtctcaatgatttgccttaacactatcaatgagatgttgaagatccccactgttattgtgtgactgagtcttttggtaggtctggaagtacttggttgtttttgaatgtgggtgctccagtgttgggtgggtatgtatttaggatagggatgtcttcttggcgaagtgaatcctttatcattgtgtaatgcccttcttcatccttttttggctgttgttggtttaaagtctgttttatctaagaataacaaccccttgctttttgcattttatttgcatgacagatcttcgtccatctctttactcagagcctgtgggtgccattacatgtgagatgtgtcttttgaatatagcagactgttgattcttattggtttgttttattttaattcaacttgccactctgtgccttttaagtgaggcatttagaccattgtattcagtattaatatttatatgtgagattttggttctgccatgatgtttttagctgtttgctttgtactctcgattgtgtagttgtgtaatagggtctgtgggctatgtacttaggtgtgtttttgtggtagtgggtattgttctttcttttccatatttagaactccttaagaatctcttgtaagtctggtctagcggtaatgaatttctttagtgtttgtctggaaaagattgtatttctctgtcactgatgaggcttagattggagtggtatgaagttcttggctgaaatttctttaaggatgctgacaacaggccccactttctggcttataaggtttttgccagaaagaggtcagcttttcacctgatgcagctgttatagctgcctgtgagatttttcctttcgtgttgaccttggaaagtctgatgggctgtgtatcttggggatggttgtagaggttctctgaatttcttgaatttttccatcgacctctgtaatgagattggggaaatttcatggactatatcctcagacatgttttccatgttgcttcctctctctccttctctttcagccatgccaatgagtcatagattagtgtctttacaaaatcccacattcctcagatgttttgttcatttttaaaatggttttttctttatttttgtctgactgggctgactcaaaagactggtctttgagctctgtaatccttccctccgcttggtctcatctggttttgaaggtccctcctgtgttgaattttgcagctccagaagttcagtttgattctttttaaaaatggctctgtcgtgtttcaacttttggatggttatactggcttccttggattggatttcaactttctctttaatctcattgagctttgttgccactgagattctgaatcacatgtctgtgataaagcaagtcattacactttaatctggtgagaatttatagctggggagctagtgtgattttttggaggtaatgaaatgctctgatttgttgaattgctagagttcttgtactgattattcctcctctgaaaatgctgatgtttctttatcgttttgaaattcctgtcatttggatggggatttttgtttttatgttcttttttttctcttgagggtttgtggtgtgtattgtgtatagttgattggcctttttttctgggtggtttcagatggccaggactctacacaggttccttccttgtggctactttcctgcattgggtttcacagatgtgtgttgaaggtatataatgatttttgtttggtggtgtaattcagtctgcaatccaggagatggtgctctagagtacgggctggcatgcctcttttctatttcagcgtgttggcagcagtgctctggggaagggggaaaagtaggattgtgaaggcgagagataaccccctcaccaaatcagttcctggaacttgggagagccccctccaatcactggtgccacacctgaattttgagggctgcacacctcccacccttagggcagcggcccaagccaaaagttaggttgccgagagacctacaactctctggggatgtgctggttgtctgggcttggtagagtcagagcaggttgtagagtatgtctgcggatctgcgggtcgtctgttgatataatgtgggtcaaggggggaggatccccgggcagggctgtggttctgtgggtgtgcacctggtgtggtgcctgcagcccagggttttttgcccagcagatggctgtggggagcacttagctcgcactcacccaaccaggcctccctccagtgtctgcccccagggcaggcccaactaggtagttttgtcccccagccttctgtgcccagatcaactggactgttagctgtttcaggcagtggtgctccctcaggcagaggctgtggacagacaggttacacccttcctggacagatcttgtagaacagggtccccaacctccaggtggcagaccagtactggtctgtgacctgttaggaactgggccgcacagcaggaggtgaggggagggctggtgagtgagcattaccacgtgagcttcgcctcttgtcacatcagtagcggcattagattctcataggagcgcgagccgtgttgtgaactgtgcacgtgagggatctaggttgcgtgctccttatgagaatctaatgcctgacgatctgaggtggaacagttccatcgcgaaaccatccccaccccaccgtctgtggaaaaattgttttccacaatgccagcacctggtgccagaaaggttggggactgctgttgcagagggagcacacccggctcccacactgacatatgaacttgggccctctcttctcggcattgtgagagagaaagctactcctcttcttgagctcaggccacagacaccagctcagtatacttgagcagtgtgcttgaatccggggggtattgagaccaggttcatgactttgtcttctggtctcatggggttgagctttggctgtgctgagggtgggggctgaactgctcccaggcctccggcaaagcactcagatggggcagtggaggctgtgctgtgtgcttacccttgcgtgagtagctaggcaggggccttgggaggggctggtggacaagaaggtacacagaccagatatgctgcagtcccatggtaaatgcagccctactgtcttctggcctggcagtaagcaggagctagagtcactcagagcaagatggagagccttgggggatgggtgcctatggtcatgttttgctgcagccgtaccaggtgcgaaaccttctgggctgtatgcgggtttgagctgtgcctctgcctattcgccagccggttcctcttgccagttcagatgtctgtgtgggtccagggatctctgggagctagtatcccagagttcgttggtgggagtgtggtgctgcacagttccttcacccaccccttccttagtttctggattgggaggtaatcctagtgcttggtgactctgtgcaggcttcccagatttattcctcttcagccttgatgcctgcattacctatcaaatttcagtgttttctctccaaagacctactccaagtgtgataatttacttgatattttggtttctctctcgcagagaggcatctcctggctgcatgtggtgaccatcttgtcttcccctaaaaacatcaaaattggtatttaatagagcttgcgttcagtctgtagactgctttcagtaataaggtcatttaaccaatattcttccagtccatgagcatgcaatatcttccatgtttgtgtcctctacaatttcttttgtcagtgttttgtagttttttttttttttttttttttttttttgtaaagctctttacaaaatctctctggttaactttattctgagccattttattattttgtagctagaatagtgggacggccttcttgatgtctttttatgctagttgattattagtgtatagaaatgttacacatgctattggcattatttttgtatgctgattttgtggcctgcacctttgctgaattctttagttctaacaggctcttttggtggcgtgtttatggttttctgtatatgagatcaggtcatgtgcacagggagacagtttgactttctgttttccaatctggatcccctttatttctctgacaatttttgtatctgcatccttcagggatattggcatgtagttttcttttgttgttgtgtctttgtctgggtttggccttagagtaatactgaactttagaataaactaggaagattttggaataatttatgaaaaattggtgttagtttttccttaaaagtttagtagaattcagagtaacttacccagttttagacctttctttgttggtaaactttattactgattcaattacattaccgttactggtctgtccaggtttccttttcttcttggttcattcttgctggttatgcacttccaggaatgtatccattttccatacgtttccagtttgttggcatatagttgttcataatagtctctcatgactccatgtatttctttgctatctccttttatgtttccctctttatttacttgagttttctcttttttcttgtttaatgtagtttgcagttttgctttattagtctacctcattcagttctgccctgcctttatcatttctttccttctactacatttgagttttgggtctgttcttgcttttttggtttcttcaggtgtattgttaggttgtttatttgaagtctttctcttttttggatgtagctgttaattgctataaattgccctcttagtgcttcttttgtcactttctatagggattgatttttttccccattttcatttgtttgaagatattttaaattttttttcttaatttattgattggcccagttgttcattcaggagcatgctgtttaatttccgtgcatttgtacagtttacaaagtttttgtcgttactgatttccatttttattccattgtggtttgagaagatatttgatatgagcttttaaactcaatatatggtctattctggagaatgttctatgtgctaatgagaagaatgtgtattctgcagcttttaatacagtgttctgtaagtgtctgctaggtccatgtggtctatagtgcaggttcatttcgatgtttctttgttgattttctgtttagatgatcccttcaatgctgaaagtcagactatggagtccccatctattattgtactggaggctatctgtctctttagtttcagtgatgtttgccttatatatctgtgtgctcaggtattgagtatatatacctttatgactgctgtatcctcttgctgaattgatcctgttattattatataatgcccttctctttctcttttattttattttattttttttacttaagatctattttgtctgatataaatatagctactcctgtgtgcttttggtttccatttgcatggaatatccttccatcctttcacttgcagtctatgtgtctttacaggtaaagtgagtttcttgtaggcagcatattatttggtctttttttgtaatccattcattctatctatatctttaattggggaatttaaatcatgtatattcaaagtttttatgagaggtgaggacttactcctttcatttattaattgtttagtgattgttttgtctatcatttgttcctatcttcctcttttattgtttacctctacaatttgctggttttctgtagtaataatgtttgattcctttctctttttcagttctgtacctgctctaccagtgagtcttacagttttttgattttcatggtggtagacattgtctttttgcttccagattgaggactcctgtaagcatttcttgtaggatcagtctagtggtgatgcattccttcaggttttgcttgtctgagacgttatttctttttcagttttatttatttatttattggagacagagtctcactctgttgccctggctggagttcagtggcatgatctcagcttactgcaacctctgcctcccaggttcaagcaattcttgtgcctcagcctcctgagtagctgggaccacaggcatgagccaccatgcctggctaattttgtatatttttagtagagacagggttttgccaaattgcccaggctggtcttgaactcctgagctcaagcaatccccccaccttggcctctcaaagtgctaggattacagggatgaaccactgcacctggcccctctttttcagttttaaaggatagctttgctaggtataatattcttgacaggcagtctttttcttcccgcatattaaatatatcatgtcattctctcctatcctctaaggtttctgctgacaaatatgctatttgatatggattcccttgtatgtgacttggtgtttttctcttgctctttgtctttgacttttgacatttgactctgatgtgctgcagagaagacattttttattgtatttctttggggatctttgagacatctgtatccagatgtttacatctctcacaagacttggtagtttttcagctattatttcattagataggttttctgtgccttttcccatctcttctatttctgcaactcccaatatctgaaaaaattttggctcatgatggcccatataccacatacactgtcttcattctttttattttattttttttatttttgctttttgtttgcctggcctcatataaagacctctcttcaagttcagaaattcattcttctccttgatctagtctattgccaacattctcagttgtttttattttatgtattgaattctcagttccaggatttctgtttggttccttttaatgctatctttttcattgttgaatttcttattcagatcataaattgttttcctgattcatttgtattacctatctttcctatcaggaatctttcctgattcctttgtattattgtgtatctcgctatgtttccttaagatcattattttgaattttataggttttgttttctttgggatctgttactggagaattactctgttcctttggaggtgtcatgtttctttgatttttcatacttcttgtgtccttaatgttgataactgtgcagctggtgtaacagtcacttcatctagttttaggggttgtcttttttctgtagatgtatctatgttgttggttgaatatggtgctctggcattgatgatgggtgggtgcattggtgtggcctccatatacttatgctttcttctgctgtaatcaacatcagcgtctgtaagttcctcagtggcttacggtgtggttgttagtagcaggggatgctgtggtgaggccttgatggtgatggggaggacagcaggccagtcctcaggcacattgatggcatacacaaggatgtatgtgtgattggcagcaccaggccatgcttcccagtttttggtggcagtgggttacctgagtggtctggcccttgggcctccaggtggtgtgtgctgggatcagaggtggcaatagcaggccaggccaaaggaccttggtgacacttgtggcactggagatgacagtagcagctgggggccggaccttggatcccttggtagcatgcatgggcactggtagtggtgaaagcaggctgcatgggcatttctctggccccctatgaggaacatttaggtgggtacctaaggcagtgtgtggagcaggcttgtccacaggttaactgaagacacgtgcaggagcctttgccagtggctggtgaggcagccctgtctttatgctcctggatgccacgtgcaggtgccggtggggcagtaggactctccttggtattagtggtagatggggcctgggtaaaggcacagaggcctgggtggggtgggctgctcctcagggtcctggacagtgtatgtgagcactgatagcaacaatagcagcagcaagcaaagtggccttgtcttcaggctctcatatggctcacatgggcgccacccctggtgggcttgacaggcttgttctcaggctcctgcatggtacacttgagtgggccagtcctccggcctcctaaaggtatgtacaggtatgcacagcactgcccctgaaggggatagggctgctggtggtggcagtggtgtcagtcaggtggctcctaggctctagacagcacacacttaggatccctttgacctagagtagcttccctggtgggctattagatgaccacctatttccacaggtatatggtgctgtggggctagggatttgggggaatcggtcctggttttgagatgatcctggttgggctggctacctcagttccctttccttctgtcatcagaggatccctatcaatttcctgctgaattccagtatactctctttgatgttttcctcaaggtgtggttacctacttgctgttttggtttttctttttgaaagaggtgagtgctgggtattcccagtcagccatctcgatgatgtctctgtctatgctgtgcatattaaggaatgtatagacgtgttttaaaacctgcacaattgaccctataactataatttaaaagatttctaccacttgaaaaacacactaatttctaattattacctctcaccccacacacaggttttatttaatatggcagaagactcaggcttaaagtgcaagatcctaacctcccatcacacacacacaagtttcatttaatatggcagcaagctcaggcttgaagtgcaagatcctaccatctttatcacagacggtagggatgcaccctgggttgtggtttctgcggtataaccccttgagtgcatttcttgtcaacacaaagacgtaagaactaaagggacaacttgtctaccactcacccacccagcattctcctaaactgccagagaccctcctattgaacagagagaaaatgggagtcacaaagggaatattagaccatagaaattctgaaatacagcctgatgtgtgcttccacttacttgatttggacttcatgggaaccatcctctgtggctttttgtggtaccttcttggctctttgttgtatccttttcataagcaatgacctgtgttttcagctaagtagtttcttcagccagcttcctccctgtagaagctcttaggtcctaaggcctcttttcatttttactgtcttgttgtcttttaagccaagctagcaagcagtgctattgttactataattctcttagagtctcttgtgaattttacttgagttcttgtcattggaaaaaccacttgtcccaatctctttgagataagcacttcaccttgtgcttcctgtgaaggaagcacactgttctgtgtagtacgacagtgccttaagatgcgtatacccttaagatctttaagggaatttgaggcaccaccttaaatctttctaaggtcttaaaatagagccttacactgacagtcttggcttcaccttcagactttctcctggcagcaccctggatttgatcttatctcagaggccatttatctcagcaatacagatgctcctcagattaggatgggtttatgtctggatggcatttgcatttgttatgtctgatatttgtaatttataggccatcataaattgtaaatatcagaagttatgggtgggttttccatttacgataatttccatttacagtgactttatcctgatgtaaccacccctgtaagccaaaaggcttacacatatcatgtcattactcaacacatatcattttcacagtattataaaaagtcagaaaatggtgagtcgaaccatgctaagtcaaggactgtctatatttgggaatctgacatgtggagaggctataaaaaggatactgaacctagaaagtcctggttcttttatatgtagtagtctttctttagcttatctcttgcattggttttactttcagcggctgtgtagtaacagtgccctttccttcaggttcccgtatcgttttcttcactatcctggagcccttcctaccagcttcttcgaggaccatcaggcttccactaacagtctctttaaaactcttcttgtttttgtgcttattcttctgtaggtcctttcagcttctgattagctcctggtccaatggtaatcctacatgttttagtagtttttgttgtgttgttgttgtgcaatctatatgtagtgtcaatatctgtatcagttatttcttggtatataacaaaatgcagtgtctcaaaacaacatctattttgttcacaatctgcagttttaggcaaggctcagtggggccaactccctttttctttacttggcatcagctgaggtgacttaaagctggggactagaatcatctaaaggcttgtttatttacctgtgcggcattcgaagctggcttttggctgggacgttaggtagggaagtcagctcgaacacctacctacatgagggttcatggtatggtttgggctttctcacggcatgttggctgcattttaaggacaagcgtccctagagagagagtcaggtagaagctgtgtgactttttgtaaccaactttagaagtcacacagcagttctgccacattgtgttccggagaaaccggttgtcaatgccagcttgtatttaggagagggaatgtcatgggagaagtggcaagcaatttgtagatgttttaaaaccaccacttcacttacctttataaaataaaaaacaatcataattatttcctctaaaggaaagcagttatttccaactcagcaccattgaaatttcagtgcaattttttgttgtcattctttaatgtgctcccttattttgtgtaaagtaacaatgaattacaagattgtgctactgaattaaggcatttttcttcagaaaaatggtatggatcatgccactgaacttttatactgggagatgtgattgcttcttaactccaagtatcattactctttgaaatgtaactcaaattagcgtaagacatttgcagttcagcaaaaggcttatggtattggaatccttttttttttttcaaaatgtattaattagagtcttattttcagagtcttattatgggagccatttattgactcaggcccaaataattcaatatgatgcccctaaaacttctctgcaaattatggagaatgatagtgggttaaaggaataagagactttgtgctaaaggggtaacttagagccattttaaggaggaaagccatgaaacagtcataggaaaacagaagtctaagatcaagtccaaatgttgtgtggcaaagatgatgaaagtaaaggatgtatttttgtgaattctggtggttttaactttgtttttaattttctgagtaatccaagggtctgtattttatgaatctacaacagtataggtaacattttattgcaactgaatttatttcaaaaattattagttttggctgggcgcggtggctcacgtctgtaatctcagcactttgggaggccgaggcgagtggatcatgaggtcaggagatcgagaccatcctggctaacacggtgaaaccccatctactaaaaataaaaaataaattaaaaaaaatttagccaggggtggtggtgggcacctgtagtcccagctactccagctacgcaggagaatggcctgaacccgggaggcagagcttgtagtgagccgagatcctgtcactgtactccggcctgggcgacagagcgagactccatctcaaaaaaaaaaaaaaaaaaattattagttttttgttagaccattctcagtctaccttcttcattacaaaactatattgttttactcatgcagattgaccttacagaagcacaggaaactgtaccttcacgatgtctacatctggatgcagagaatgaagttcttcaacttcaacagacattattctctatgaaagcaatacaaaagcaatgtgaaacactacagaagaataagaagcagctgaaacaagaagtagtaaacctcaaaagttatatggaaagaaatatgttagaacgtggtaaagctgaatggcataaactgttgattgaagaaagagcaaggaaggagatagaagaaaaattaaacgaagccattctcaccttgcaggttggtttatttatctgtaatgtgctttcattcatttcgctgcaaattttattttggatatatacattgtacatgttttctctactttccttacagcaatttgtttggtagacttctagaaggaaggtggtatttgtttctccatttaaatattttcgtttccatcattcttataagtaaattgatcttccataagaataattctcactagagaatcatttaattactaaagccagttggcataaaacaagactaatagggaaagtaaaaaaaaaattgtgatttagaaattataccatactcttgaactgcttttaagttacgttgttccacttttaaaattttaacttggttctgtcattctttggagaattgttcaacaattcagattcagttattaattcagttggtactggtgataaatatgttaagcttgagcttctttctttcttcacatttttcttaaaattgttctctgaatcacgtacttaaaattgttctctgagtcactgactccaaacaaaaggaaacaaatacacagtaattattcaggttataattacttttaaaatgttcccttttaatttattttagaaacaagcagcagtatctcatgaacagttagtacagttaagggaggataatactacttcaataaaaactcagatggaactcacaatcaaagatctggaatctgaaatctccagaataaaaacttcgcaagccgactttaataaaaccgaattggaaagatataaggaactctacctagaagaagtgaaagttagagaatccttgtcaaatgaactcagtaggtaagtcaatatgcagaatcatagaaaataagttaagctcattaatttgccttcaaaagcatgacttttagtgagacaggttcatgagatttgtgggaagtgaaagctaactagatcatacaattttggaaaattgtaaattataaatagtaaatgaacttaacctttaagtaaaattgaaaatagtaaatgaacgtaacctttaaaatcttagtccaggacagttcctgtctctcctgttttttggttttatgtggcttcccccaaccccttaatattcttatatagttaacctgatctattagggtttcagctaaatatttatgaagcttcataatttagacagtgataccattataaaaattgcttgtcagtattcccttaattcaaaatactaattaattaatttctggaagacgacagctgaaaacagaaagggtcaagtacgactactctggacacattctggcactcagtaaattcactttgcttgattgtgatcattagagggtgccttgagaagaagtgtcctgtatagtttttccaatccacataaaggcacacttgtgaagcagagaatgatcaactagggttgaagggaagtataacttactaagtgataaaaaaataacaccttggtcagcctgaggcggtatatggaagacagaaagggcaggccccacctctgatacatgggccgcagtgttaggagctgattgtcctcgatgctgctttagttctctttgatttcagcagtcttattctccccaaggaaaagtcgccgtgaatgattcctcagtgccaaatgctcaagtttttccagataatgggtgaaatatacaagggtggtgaaaacaattgtttgaaaatgtctttgagagagagttttttagacaatctctaacaacatgtattgtttactaaatacaagtatttctagcttttatttttacttttagttttttcttgtatatatttaaggagtacaacttgatgttttgatatatttatacgcagtgaaatggttattttgtcaagcaaattaatatcttcatcatttcacatagttacccttggaatacaagtaattctaatggcatccttaagaatcatataagtagagtcattccagatgggcaacaagtgttaactatgaagccatacatcattgatagtcttttctgtcccctccctctctttgaactacttgtttgttagaaatccctctagaaatagatgtacttctttagaacaatgttaaaactataattggatacagtaggcatgctctaacacattttcagagttaaaacacggcttatggtatattccatttactcttaatggcaacttttagaacaatcgaagtcatttaggaatcatttaggaaaaaatgaaatactaagcatttgtctttttcaatcttcatagaactaatgagatgatagcagaggtcagtacgcaacttactgtggagaaagagcagaccagatccagatctctattcactgcttatgctacaaggccagtcctagagtcaccttgcgttggaaatcttaatgatagtgaaggtctcaacagaaaacatattccaagaaaaaagaggtctgctcttaaggacatggagagctacttgttgaaggttagctatcttttttccttcggcgttcagatttctgatagaattcttgtatgttatttggtaaaatagttacttaattgtcttgtgtatggtaagtaaaagtaataattacctgtgttaataaagagaggagacagaaattttaccgttatttttaagtctctggagctctcattgataagagattactcctttgttaactttatttaataaatgtaaccaaactgacacattttaaatttttttaaaaactgcatttaagttagattttaaccaaaggtttactttgatgtgctttgtcttactaattgattttagtttgtctggggttcacttttaatgggtttagtgtgcctggggtcacttttaaagtttttctgcgtcatctcaggttttctacctgtcatcatatgtgaatgattggtgtccaaacactaaccacccatggatgtttattatttaaaaggacccaaggtgaatacttttatatgttatataaacctgcaacacttgattaatctgttctttaagttaaaagttttgtgattttcttatatgagtacatctgtaattgctattgcacttaatagtgttttaatcccaattttagtaaaatgtgtctattgctatgcaatagcacagtggttttgaaatagttaaatcaaataaatatttgaatttttaaagtaaagctcacataagttttgtctctctacctggccataactttagtaattgatgactaagatggcaatggtatctagagtccttcaatagcaaatgtgaccaaacagaatcagttctattcttaataccccaaattccatgtaaagctgcacatggacatctcccctggacatgtaacaggaaccttttagttcaaccgtgtggtttcactcagagtaagagtctatttctggggatttcaaaatggatccaaaaatgacgagctgtatcaactatagagttggtaaggaaaaaaaaaacaaaacgtagttcaactatgcttgacccagattaaggtatttgtctaacatttgtccatttttcaactgagggaaaattacaaaaactgggcacagtggcacacacctgtagtcccagctgctcctgaggctgaggcaggaagatcacttgaacccaggagttcaaatctgcagtgcgcaatgattattcctgtgagtagctacggcactgcagcattccaatctgggcaacatagcaagattctgtctcttaaaaaaattacaaaatccataaaacatttgtttgaacaacaatagataaatagttttctttgtgtatattgttgtttttaaaattttcaatcgatgcacattggcttatagttttgatgtttttatgatctccttagcgcacagaaaagtagcgcaggcccacatggaatgaacctcaaccttgttgtgtttacctggctatttcgtgtcctaacaaatcatagaagagcaaatctaaggtttcttagatagcattgtggccaaatagcttaaaagggaatgcattaaatgattgttttaatacatagattacaagagcccagctagctgatatttttaatcatattgttcgcttaggttttatttttctgaaaaaaatgagatgatcagcgtccaaatgcctcagtcatgaaattgtaccactgggtactaatgggaaatgaatgttaaatacgtctgtaaatggttaagcaagatgcaaatataatgttctcattagtactatgaacccccaaaatttgagacaagtctcaattaatttagaaagtttattttgccgaggttgaggacacacatccatgacacagcctcaggaagtcctgatgacatgtgtccaaggtggttggggcacagcttggttttatacattttagggggagacatgagacatcaatcaatatatttaagaagtacattggttcactctggaaaggcgggacaatttgaagcaaagggaggaagactggtagcggggagggggcttccaggtcacagataggtgagagacaaacagttgcactcttttgagtttctgattagcttttccaaaggagacagtcagatctgcatttatcttagtgagcagagaggtaactttgaatagaatgggaggcaggtttgccctaagcagtttccagcctgagttttccttttagcttagtgattttggaggcccaagatattttcctttcacagtacttaccagaaaaacaaggtaatgtatcattttacaagatagtgctgagagagtataaaaagcagatgtaggccgggcactgtagctcaaacctataatcccagcactttgggaggccaaggtgggtggatcacctgaggtcaggagttcgagaccaacctccaacatggtgaaaccccgtccctaataaaaatacaaaaattagctgggcatggtggtgtgcgcctgcagtcccagttacttgggaggctgaggcaggagaattgcttgaacctgggaggcaaaggttgcagtgagctgagattgcgctgctgcactccaacctgggcgacagagcaagactccatctcatgggtgggggaaaaaaaataaataaaataaataaaagcagatgtgatgcaagggaagatttttgaggatcttttttttttaatttctgttttgtggggaagggggtgttcattttttagtatttctagataagtagaaaatttgtttgttttaaagttaatgttaatgtagtagttccaaggcatacctagtttccttgtggggcattttttgcccaatcatgttagatttactaaaagagatttaaaagcatgattatatcaagatatgagtgctgggtacggaggctcacacctgtaatcccagcactttgggaggccgaggcgagtgggtcacttgaggtcaggaattcaagaccagcctggacaacatggtgaaaccctgtctctgctaaaaatacaaaaattagcctggcatggtggcgggcgcctataatcctagctacttgggaggctgaggcaggagaatcgcttgaacccaggaggcagaggttgcagtgagccaagattgtgccactgcactgcagcccaggtgacagagcaagactccatctcaaaaaaaaaaaaaaaaaaaagatacaaaggcatgtctccataatcacaccttggaagagttcttatacagctgttgtctacagaattttgagagttacagaaagaaggtgccttctagagttgctaggaacttaagtatttcctataggaaaacatcagctaatacaaggaggaggaggtaacataccatctaaactgagatttacaaaaaaaggtagggggtggggtgggtttctgggtggggtgggtttctgggtggggcattacaaaacaggatatttagaaatttttagctacgattttcaaaagcaaaatgttaaaaatagcactaatattggatctgtttatacatctcctttatttgcaagattttaacactttggactattcctactgtgaagtgctatcatactcagcattttctctaacctcaagaaaaatggttataattttgtatgaaatcacacaccagagaaataatatattataactggttgttgaaacaagttttctctacattcatgacagttagcatttattgcatctctcaccccattatatgaagtctagagtctgactgttcccagaccaaactgagagtcgggctgctatttatcatggtccagtaatgagatgcagatgaattgggaagagaggttttattttctgcaaccggttacggggttacaaggaaggcctggaaattattaccacaccaattcaaaattacaaagttttccagagcttatataccttctaagctatatatctacatgtaagtgtgcattcgtctatagacataagtttaatctataacgttaaagatctaagtcctgcagaccttcctctggagcttcagtaaatttatttaatctaaatgggtccaggtgctggggtgattacccttatcttgtctcctgctaaatcatggaggtttgggagttccattagacccccaataaacttatttgtggaggcctggggagtttcttgagatccccaataaaacttgtttaataccaaacaggtcctattaagaattccttcattattttgtcatactttaaggcccagggaaggcctaggcaagattcttggtgggcttttgttacattccagcctgtataagggcactggctctttcagcttttaatgtttaacttaactactcagtcagtgccaaagcagttgttatggaggcctgcgttagtgagacctggcctgccacatagccttgccacttaacaccattgtagtgataatagattgctatgcctgtgttttactgatttttacttataggtttcacattctagattaaccctgggatcctttgtcctatatatcagaagtactttttatagttttattggctccttattttccagcctgtaatctcaagtataatttagcagtagcctgtcaataagttattgctgaagagtgaactttgtatttattggactttgcctttggtactgatttcactatatttctttaaaaaaattttctaactactcccctctttaaagtggaggtagttgtgaagaatgtatggtaagattagaaaagtcaaggaagaagaaactatttctataagtgttatacagtcatctttcttgttcaggctgtggtggataggcagcaaatggtgctcctccttcccttctgagttcagaacacaggagtcagatagatggacatcaacacactagctctattgcagactcatgataactaatgggaggatgtggctcagatgtgcagccacagtattttatcccagattaggcactaatccacagagttttaagtggagaaaacaaatgcttgacacccatcgcaggtgcatgctgcttactgcagagatgacagcagacctgaactcatgtcactgtgggcagacacatcttttgaaagagaccctgagccaagcaagcacactgtgtgctttgcccaaattcacccattaggtagatctgatatcctctcaagaggaagctgtaggtagagagagtctaagtcctcatttgaaacctgaggccaggaaaatgaaggttctcctatcatttatggctggatttaagtgataattgaaattaatcccatgtctttgtatgtacaaattaatgatgagaagttggacaggcgtatggtagatggtaaagagaaatctgttttgtgttttcagtttttctataaataactcacaacatggataattgacttgattgattttcctaaaccacgtcttatttggaggagaatgaatagttcttttaaggaacagttttcttaatttctgcttgcttggttcaactaaagattttctccttcaagttttctgttctgcggtttgaaaaatgggttctttataaattgagtgtcttgactggtactagccagaagttatgatattaattgttctttaaatttgattcataacttacaatttggagagctactattttttgtctcatgcttaaacattatagagcatcatgacagtttatagatgcattttctcttttttgttgttgttgttgtttttgaggcagagtctcactctgtctcccaggctggagagcagtggcgtgatctctgctcactgcaacctctgcctgccgggttcaagcgattctcctgcctcagcctcctgagtagctgggactacaggtgcacaccaccacgcctggctaatttttatatttttagtagagacggggtttcaccatattgtccaggctggtcttgaactcctaaccttgtgatccacccaattcagcctcccaaagtgctgagattacaggcgtgagccaccacacctggactgtctgagttatttttttatttttattattattattatttttgatgcggagtctgactctgtcacccaggctggagtgcagtggcacgatctcagctcactgcaagctccgcctcctgggttcacaccattctcctgcctcagcctcctgagtagctgggactacaggcgcccaccaccatgcccggctaattttgtgtatttttagtagagacggggtttcattgtgttagccaggatggtcttgatcttctgaccttgtgatcctcccgcctcggcctcccaaagtgctgggattacaggtgtgagccaccgtgcccagcctgagttatttttaaaaatctgtatttcttttctgaatatgaaggaaggtgctggcatagaataactccaggctcagtgaaagatctgaagcccactcctaccttgtaactaattggttttgtgacctcaggcaagctgcagtctctccgagcctgttttgtttcttatgtaaaattaaggactttgactaaatcagtgacattcatacgtttaagtaaatctcttttttttttaagaatggaacttttttaaattgcataaaaccacattatagaaaacagaagtagtgctgcctgactaaaggaaggatcagtgctctgaagctgtgactttcttatcccttaatccttcagcatcctctgtggaaccttagatttctgtgggacatagcttgaaaaggatcatttcttgaattattacttttataaggcctggatggtaatgctgttgtcatgttacctactctataaagcctatctataatgtttttgtcacagaaatgttatggaaaggagtctcaaaatattggtaaacctgttagtaaaaaaaaaaattgacttgacacctaaaatttctaaaggcattagatatcattatctttatcaccacaaactatctcagaccccgttctaggcatttagtgagagaatacctattctaaaaaaaaattaaataagagcactctagatagggacactggcaataagtttgaaatattctgacacctttcataattaagtagataactataacttgtcagatgcttaaaaaatgggtactaatttctgaaaagaaatcaaagttgcagttaaataactctaaattgttttcctagtttttaattctagacactcatgaatcaaagaaactaagattgaaaactggctctaacctgtatttatccttgtttttatgtaaattttctgaaatctttgtgtccgtatgaatgaagaaatgttaatcataatagcataatatttttaatcttttgccagtggaactttcacatggcatcacaacaatactgctttcttcaagtatgtattaaagattctgtgctgaattaatagcaaagaacatactttgaaattattattttctaaaagtggagaatggggagttcattgtaaggaactattcattaaagtgaaaaactggttagaccttgataaagggcagagttttgataagaatgggaaagtaatgcattcattgcagaatatgacttgaattgtgtaacctctgtactaataagggaaaacatcacacttttgaaatgacatagctccaacagaccaatattaattgtacttttgtgagattaatctaaacagcataacacatatatgttctccattatctaaacttaaaataggtaggaatttatatgatatttttaatttaagcaatcttcaagttaggtctagtctgtaaaagtattatttaaaggccgcattttgtaattaatgctccttaccatgataatgtatcttcttaaacgttataaataatatttgacttatttcagatgcagcagaagttgcaaaatgatctaactgcagaagtagcaggtatgttaccaaaatttatgaattaaatttagattaagtaatatatatctgaaataaactgcaaacgacatccctttccgttcttgggctagtagatactacattaaatattctttcatatacatctaatgaaagatgtgaaaacttgaacatgtataatgaagagcatacttatgcctcatgaattcatcacgttccatagcttgaaaaaaatagctcaagaagtctggctctactcttcacttctgccatccctatggaattgtcagccagcacacagaaacggttctcagaaaacagaagcatcatcaacttctcagggttatggtagtgatttttaaggccaaaacatcccagtctcatctagtaacctattcaagcagttacagtttataagcagtcgcttgagaggtaacactttaaatctccagtcatttacagtgtcattggtttacttttgccctcagaaaaagttccaaattccttaacatgtaatataaacacccacattcatttggttcttgtcaagttactcaggcttatctctcaccacttactttactctgcccctttgctctaggatccagccaaactggactgcacagaattccacagtgctcgtccttctcctccagctctttgcacttgcttctttgctctatctgccaacctttttttctcatccttcaggtatccactaaccatgcctccaccgaaaagcctacagtatcgagacaaaactgggataggtgtccctcttgcattccaatagtgccctgttttatacctgtcagggtatctatgacttggtatggaaattgcctatttgtctgctttttcaggttatagcatatgattgctgaggggtggactgtatcatcttcatcttgtaactccagggcatagtctagtaccttagcatgtggttgttgaataaatgaatgaagaatgagaaaaccagaagctgtgatacacaaccacaatgatcattaatttagtgtgcaactgtgggcagattcttatctaataataagttagcattgtagtcatacatacttttcattcttgttaacactgaaaaagctctcaactcttttttactgatttgcacttagttaactatgaaatatatagaatataattctttggccaggcatgttggctcacgtttgtagtcccagcactttgggagcctgaggcaggcagatcactggagcccaggagtttgagagcagcctgtgccaacatgacgaaaccctgcccctataaaaaatacaaaagcttgccaggcacagtggctcatgcctgcagttccaagtacttggggctgaggcaggagaattgcttaagcctgggaggacaagactgcagtgacctgtgatcacaccatggcactccagcataggtgaaagagtgagaccctatcttaaaataataacaataataataataatataattcttgctttttttttcagctgctactaaatatgaacctggatcctatatagcttctcctctaggatttacacacaaggaaaatctgaatcaagatccagttttggaagtaacaaaagaatatgcacagattttaagaagaaaatacatactctgaaagataaggcaattttatttgggctattcacatgatattttgtttcccattaaatatatgatgtgaacatttttactaaagggaaatattctatattatacatgtctgatgaaaatttatatagtattttaaataatgtttcttggcctcttcagctaacttttaagtggattttgcaaatgaaaaccagtattactgagttttacatactcgaactgcccaaatgtttgctgtttaaacagccaaataatcaagttgccattagtaatttagtggagccaattgatggcttgtttgtattttataattttatctttatacatagtgatagatttaagtttagatagacatcattttggtatactggtactgtggtcattgtcaatgtttggatgtattacgattgttatagtgcaatcaaacttagataattttaattttaagcactgatttatttagatctttccttgtggaaaaataaggtttgcctaaggctttttgcttttttatttattgtttcatttctttattagattaacttttgggaaacagtcttaaaattggagaaaatttccacattttaggaaaaacagctttccccctgtgggccatttgagagtaaattgctgacattatgccatcacatctggtatgtgggtattcccacaagtcaggacattttatataactacttcataatcggaaagttaacatcaatacacttgatcatttaattctcagtttcttttcaagttttcttaattgtctataatgttctttgtagcagaaggatcccattcaggtccatgaatttcatttagttgtcatgactctttcagtctggaacagttcctcagtttttctttgacctttatgaccttaaatcttttgaagagtaaagtccaataatacagaatgtccctccattggatttctctgaactttttttatgataagatttagatgataattttttttttggcaagagtatcacagaagttatcccatgatcttctcactgcattctatcaggtgacctgcaattattattattttttattttcatcttttaagttcaggggtacatgtgcaggatgtgcaggatgtccaggtttgttacataggtaaatatgtgccatggtggtttgctgcacagatcatcccatcacctaggtattaataatagcccagcatccattagctgttcttcacgatgctctcccttctttcacccgccaccatcccacatgcccctgtgtgtgttgttccccgccatgtgtccatgtgttctcattattcagctcccacttgtaagtgagagcatgcagtatttcattttctatttctgcgttggtttgctgaggataatgttctgcagctccacccatgtccctgcaaaggacatgtctcattccttttcatggctgcatagtattccatggtgtatatgtaccacattttctttatccagtttatcattgatgggcttttaggttgattctttgtctttgctattgtgaatagtgctgcaatgaacatacgtgtgcgtgtatctttatactagaattagttatattcctttgggtatataccaagtaatgggattgctgggttaaatggtatttcaggttctagatctttgaggaatcaccacactgtcttccacactggttgaactaatttacactcctatcaacagtgtaaaagcattcctgtttctccataatcttgccagcatcttttcatttttttgaattatagccattctgactgttgtgagatggtgtctcattgtggttttgatttgcatttctcagatgatcagtgatgttgaagtttttttgtttgttggctgcatgtatgccttcttttgaaaagtgtctgtttgtgtcctttgaccactttctaatggggttgagtttttttttcttgtaaatttgtttaagttccttgtagatgctggatattagacctttgtcagatggatagagtgcaaaaattttctcccattctgtaggttgtcggtttactctgttgataggttcttaatgctgtgcagaagctctttagtttaattagatcccatttgtcaattttggcttttgttgcaattgcttttggcatcttcgtcatgaaatctttgcccttgcctgtgtcctgaatggcattgcctaggttttcttccaggatttttatagttttgggttgtagatttaagtctttaatccatcttgagttaacttttgtatatgggttaaggaaggggtcccgtttcaatttgctgcatatggctagccagttctcccagcaccatttattaaatagggaatcttttccccattgcttccttttgtcaggtttgtcaaagatcacatggttgtaggtgtgtggtcttatttctgggttctctattctgttccattggtctatgtgtcggttcttgtaccagcactatgctgttttggttactgtagtcttgtagtatgtttgaagctgggtagcatgatgcctctagctttgctcttcttgcttaggattgtcttggctatttgggctcttttttggttccatatgaattttaaaatagctttttctaggtctgtaaagaatgtgaatagtagtttaatgggcctagcatttaatttacagattgccttgggcagtgtggtcattttcacgatattgaaccttcctgtctgtgagcatatgtttttccatttgtttgtgtcatctctgatttctttgaataatggtttatagttatccttgaaaaggtccttcacttttcttgttagctgtattcctaggtattatactcttcttgtggcaattgtgaatgggagttaattcatgagttttctctcggcttgcctgttgttggtgtataggaatgctagtgacttttgcacattgattttgtatcctgagactttgttgaagttgcttatcagctaagaagtttttgagctgagatgatggagttttctagatataggatcatatcatctgcaaacaaagatagtttgacttcctgtcttcctatttgaatagcttttctttctttctcttgcctgattgccttggtgagaatttctaatactgtgttgaataggagtggtgagagagggcatctttgtcttgtgtcagttttcaagggaacgcttccaggttttcaggtactcaggcaacaaatagcgttacaatagaatagtacctcacatctcaatgctaatgttgaacgtaaatggcctaaatgctccacttaaaagatatagaatggcagaatgggtaagaattcaccaaccaagttgctgctgtcttcaggagactcacctaacacatacggactcacataaacttaaggcaaagggttggaaaaagacacttcgtctaaatggacacatcaaaagcgagcaggagtagctgttcttatatcagacaaaacggactttaagacaacagcagttttaaaaagacaaagagggacattatataatgataaaaggactagttcaacaggaaaatatcacagtcctaaatatatatgcacctaatactggagatcccaaatttataaaacaattactactagacataagaaatgaggtagttggcaacacaataatagtgggggatgttaatactccgctggcagcactaggcagatcaccaagacagaaagtcaacaaagaaacaatggacttaaactataccctggaacatatggacttaacagatgcttacagaacattctacccaacaagcatagaatatacattgtatacatcagaacacgggacattctccaaaatagaccatatgatagggcacaaaacaagtctcagtaaatttaagaaaatcagaattatatcaagtactctctcagaccacagtggaataaaattggaaattaattccaaaaggaacactcaaaagcatgcaaatacatggtaattaaataacctactcctgaatgattgttgggtcaacaatgatatcaagagggaaatttaaaaattctttgaactgaacgataatagtgacacaacctatcaaaaactctgggatacagcaaaagtggagctaagaagaaaattcatagcattaaatgcctatatcaaaaagtctgaaagagcacaaataaacaatctaaggtcacacctcacagaattggagaaactagaacagtccaaatccaaacccagcagaagaaaagaaataacaaaatcagaacaaaactaaatgaaattgaaacaaaaaaatacaacagataaatgaaaaagctggttctttgaaaagataaataaaattgataagcattagcaagattaatcaagaaaagaagagagaagatccaaataagctctattagaaatgaaatgggagatattaccactgataccacagaaatacaaaagattattcaagactactatgaacatcttcacatccataaactagaaaacctacaggagatcgataaattcctggaaatatacaaccctcctggattaaattaggaagatatagagactctgaacagaccaatcagaagcagcaagattgaaaatggtaatttaaaaattgccaacaacaaaaaagtccaggaccagatgaattcacacctgaattctatcagacattcaaagaattggtactcatcctattaacactatttcacaggatagagaaagagaaatcttccctaaatcatttgatgaaaccaaaatcaccatgatatggtttggctctgtgtccccacccaaatctcatcttttagctcccataattcccacatgttgtgagaaggacccagtaggagatgattgaatcatgagggcgggtcttttccatgctgttctcatgacagtgagtgaatgtcacaagatctgatggttttaaaaacaggactttctctacacaagctctttctttttgcctgctgccatccacgtaggatgtgacttgctcttccttgactctaccatgactttgaggcctccccaaatatgtggaactgtaagtcaaataaacctctttcttttgtaaattgcccagtctcagatatgtctttatcagcagtgtgaaaatggactaatacacaccctaatactgaaacagactaatagacaccctaataccaaaagcaaggaaggacataatgagaaaagaaagctacagaccaacatccctgatgaacagagatgcagtaatcctcaaaaaaaatactagctagctgaatctaacaacatatcaaaaagataatccatcatgatcaagtgggtttcataccagggatgcagggatggtttaacatctacaagtcaataaatgcgatacactacataaacagaattaaaaaacaaaagtcacatgatcatctcaatagatgcagaaaaaccacttgagaaaatccagcatccttattttattaagaccctcagcaaaatcagcatagaagggacatacattaaggtaataaaagccatctatgacaaacccacagccagcattatactgaacagggaaaagttgaaagcattcctcctgaaaactggaagaagacaagattgcccgctttctccacttctattcaacatggtactggaagttctagccagagcaatcagacaagagaaagaaatcaagggcatccaaagtggtaaagaagaagtctgcctattgctgtttcccaatgatatgattgtatacctagaaaaccctaaagactcatccaaaaagcttctagaactggtaaatgcattcagcaaagtttcaggatacagagttacacacaagtgtgcacaaatccgtagctgtgctatacaccttcagcgaccaagccaagaatcaaatcaataactcaaccctttttacaatagctacaaataataataataataataaaatacttaggaatgttcctaaccaaggaggtgaaagatctctgcgtggaaaactacaaaacactactgaaagaaatcacagatgacacaaacaaatggcagcacatcccatgctcatggatgggtagaatcaatattgtgaaaatgaccatactgccaaaagcaatctacaaatttaatccaattcccatcaaaataccaccatcattctttacaaaatgatgaaaaataatcccaaaattcatatggaaccaaaaaagagcctacatagccaaaggaagactaaccaaaaagaataaatctggtgacatcacattacctaactccaaactattctgtaacaccatagtcactaaaacagcatgatactggtataaaaataggcacatagaccaatggaacagaatagagaacccagaattaaagccaaatacttacagccagctgatcttcaacaaagtgaggaaaggacaccctattcaacaaatagtgctgggataattggctagccacatttaggagaatgaaactggatccttatctctcaccttatacaaaaatcaactcaagatggatcaagaacttaagacctgaagccttaaaaattctagaagataacattggaaaaacccttctagacattggcttaggcaaagacttcatgaccaagaagctcaaaacaaatgcaacaaaaacaaaagataaatagatgggacttaactaaactaaaaagcttttgcacagcaaaagaaataattagcagagttaacagacaacacacagagtgggagaaaatcttcacaacctacacatccaacaaaggactaatattcagaatctacaaagaactcaaatcagtaagaaagaaaccaatcccataaaaaagtgggctaaggacacgaatagacaattctcaaaagaaaatatacaaatggccaacaagcatatggaaaaatgctcaacatcactaatgatcagggaaatgcaaatcaaaaccacaatgcgatatcacctcattcctgtaagaatggcaatattaaaaaaattaaaaaataatagatgtcggcatggatgtggtggaaagggagcacttttatagtgttgatgctaatgtaaactagtacaaccactatggaaaacggtgtggagattgcttaaagaactaaaagtagatctaccatttgatccaacaaccccattcctcagtatctacccagaggaaaagaagtcattatacaaaaaagatacttgtacacacgtttataagcagcaaaattcataattgtgaaaatatggaaccagcccaaatgcccatcaatcaatgagtggataaagaaaatgtgatatgtgcacacacaccccatggaatactactcagccataaaaaggagcaaactggatggaattggagaccattcttctaattgcagcaacctggatggaattggagaccattcttctaagtgaagtagctcaagaatggaaaaccaaacatcatatgttctcatatgtgggaactaagctatgagaatgtaaaggcataagaatgatacagtggactttggggactcaggggaaatggtgggaagggagtgagaaataaaagactacacattgagtacagtgtacactgctcgggtgagggatgcaccaaaatctcaaaaatcaccactaaagaacttatttatataaccaaacaccacctgttccttaaaaacctattgaaataaaaagtaaatttaaaaaaaacctcctggattcattgatttttttgaaggtttttttgtgtctctatttcagttcagctctgatcttggttatttcttgtcttctgctagcttgggagtttgtttcctcttggttctctagtccttttagttgtaatattaggttgttaacttgagatctttctctctttttgatgtgggcatttagtgctataaattttcctcttaacactgctttagctgagtcctggagattctgttatgttgtctctttgttctaattagttttaaaacacttcttgatctctgccataattttattatttaccccaaagtcattcaggagcagattgttcaatttccatatagttgtgtggttttaagtgaatttcttaatcttgagttctaatttgattgtgctgtggtctgagagactctttgttatgatttcagttatttttcatttgctgaggagtgtttttcttcctaatttatgattagttttagggtaagtgtcatgtggctatgagaagaatgtatattcgcttgttttttgttggagagttctgtagatatctatcatgtctacttgatccacagctgagttcaggtcctgaatatctttgttaattttctgtctccatgatgtgtctaatattgtcattgtggtgttaaagtctcccactattattgtgtgggagtctaagtctctttgaaggtctccaataacttgctttatgaacctgggtgctcttgtatagggtgcatatatatttaggatagttagctcttctggttgaattgaaccctttaccaacaggtagtgctcttctttgtcttttttgatctttgttaatttaaagtctgttttgttagaaactaggattgcaagctctgtttttttctgctttctgtttgcttggtaaattttcctccatccctttatttttagcgtatgtgtttctttgtgtgtgagatgggtctcttgaatacagcatactgatgggtcttggttctttatctagcttgccattctgtgtctttcattggagaacacattgagatttaaggttagtagtattatatgtggatttgatctcatcatcatgatgctagctggttattttgctaacttgtttgtgtggttgcttcacagtgtcactgttctttgtactttagtgtgtttttctggtgcctggtaatggtttttccttttcatatttactgcttccttcaggagctcttgcaagacaggtctggtagtaacaagttccctcagcatttgcttgtctgaaaagcatcttatttatcctttgcttatgaagcttggtttggccagatgtgaaattctgggttggaaattcttttctttaagaatgttgaatattggttcccagtatcttctgacttgtagggtttccactgagaggtcggctgttcatctgatggggttccctttgtaggtgacctggcctttctgtctgactgcccttaacattttttctttcatttagagtttggagaatctgatgattatgtgtctcagggatgatctcctcgtggagtatctcactggagttctctggatttcttgaatttgagtgttggcctgtcttgctagaactaacctggggaagttagttctcttgaatcctatgctgaagtatgttttccaacttggttccattctccttgtctttttcaggtaccccaatccatcatagattcgttctctttatgtaatcccatattttttgatggtatcgttcgttccttttcattcttttatctctattcttgtctgcctgtcttatttcagaaagattgtcttcaagctctgagattcttttcttgggctattctgctgttaataattgtgatttcattgtgaagttcttgtagtgtgtttttcagctctaacaggtgagttatgtttttctctagaccggctattttggctgtccgctcctgtattgttttgtcatgattcttagtttctttgcattgggttacaagatgctcctttaggtcattgaagttcactgttattcacattctgaagcctactctgtcatttcagccatctcaggctcaacccagttctgagcccttgctggagaggtgttgcagggatattctggctttttgagtcctcaggattttggggttatttctcatctctgtgggtctatcttaaactttgaccttgaggatggggtttttgtggctttttaaattgttattgttgttgtttcctgcttgtttttcttttaacagtctggccactcttctgcagggctgctgcagtttgctgggggttcgcactataccctagttgcctcggtttttcccatagctggaggtatcatcagtgaagtctgtgaaacagcaaagatggctgcctgccacttcctctggaagctccagcccagcagcgtactgacttattgctggctcgaaagtgcatgtaaggaggtggctggagaccccagttgggaggtctcctccagtcaggagaaatgggataagggacctgcttaaagaatgattctggctactttttggtagaccagctgtgctgtgttggggatcccttcagttcccattcagtttgggctgtccaaaggcccacaggctgaattggctgagaagcttgaaaggcctaggtggcagcctgccccacccctcaggcactccatcccgggaagaaattagagctctgttagccccatagaacatgagtgacctacaattttgatttgcccttttactggtgatgttggcattgatcacaaacagtggtgtctgctagctttctcctctgtaatgttactttttcaccttgtaattaattaatattaatattttgtggggaggtaatttgagactatgtagatatctctgttcttcatcaaactcaatttattcatttacttgatttgatatttacttgtggtttatttcatttaataggttataatttgacaatttttttaacaatttttttctttttagaaatgttttattttgacaattttagacttatagaaaaatagtaagaaacctacaaaacattcttggatactattccccaaatgtgaacattttactatatttgctttatcctttctcccccttttcctcttctctttctaggtaaatataaatgtaggtgcataatatagactttttctgaatggtttataagttgcaggtatgatgcctctttatttctaaataattttatgtgtgtctcctaaaaacaatgcattatcttgcataattatagtataactatcaaaatcaggaaattaaaaatggtttactgttaatatctcatccataaaccttattttacttttttcagttgtctcaataatattttttatagccaaataatttaagatgggtgattttacaatccatgatgttgactttcataatccatgatgttgagaggtttcagcatttttacgttgattctttctcatctctgtgggcctatctacctttgatgtttgaggttgctggcctttggaggaggtcgatctgtgtcaaattattctgtctttttagtctcttttagtccagcatgattcctgagtctttccttgattttcatggcatttatgtgtttgaagagtatgggtcagttttttgtggattttctctcagtttgggttcataggatatttcttcatgattcagttcaggttataccattcaggcaggaaggtcacacaagtgaggctgagttcttcccaatgcagcatatctggaggcatatgctgttacttggctccattactggccagtgttggctttgtttgagaatctaccaggtctgtccatgataaagtgactatctaccctttgtttttcaccaatgtcttacgtgaacatagtttgaggctctgtaaatatctggttactctaaacatctcacccactagatttagcatttcattgattatttttgttgggtcagttattattatggtggttgccaaatcatgattgtcttcatctttcattccttctaagtggataagtaaaacaaaacaaaaccaaccaacaaataggggagaagggaaaatttattgttttgctgttcaggttccctccgctttgaccagtggtagccatttcaagctgagttcatgtctttttgaactgtccttattgttctttgaatacttccttactttctggcataagctgtttcaaccatacttcgtattttctctgccctagcccttgaatcagccattttcatttttttccagaagccctgactttctttaggggacagtaattagaaaccaatatctgggcagtaattgtggtagatacgtatggctattggagttgtcattgctcataggcttcctcagtgaacagagcagaaaaatacagctagatggataaatatacaaacatacatgcttatattcatccatatttctatattagaatatactgaaaaccatgagttcttcctggtgattctaattccagttgaatcacacatggctcattttagtttttttttccctttcagtactcttgacctttgaacaatgtggaagttagaggggctgaaccccacacagccgaaaatttgcctaaattttgacttccctgtaatgtaactgctgactgacctgattaactattgttgaccagaaaccttacccataacaaagttgattaatatatatgctgtatattctatgtattatacactatattcttataaaagtaagctagaattgccttagctattccagctgttttggggttcgatataaattttaaaatagtttatcctaattctgtgaagaatgtcattggtggtttggtagctgacttcaaactatactacaaacctgcagtaacagaaatagcatggtactgttacaacagcagacacatataccaatggaacagaatagagagctaagaaataatgcagcacacctacaaccatccaaccttcaacaactccacttaaaaaaagcaatggggaaagcaatgggactgctggatcaaatggcaattctaagttctttgagaaatcgccaaactgctttccacaatgactaaacaagtttaaattcccaccagaagtgcataaacgtccccttttctccacaaccttgccagcttctgttagtttttgaccttttaataatagtcattctgactggtgtgagatggtgtctcactgtggttttgatttgcatttctctaatgattagtgagtttgagcatttttttcgtagccttcttggccacatgttatgtcttcttttgaaaagtatctgttcatgtcctttgcccacttttgatggggttgtttgttttttttcttgtaaatttaagttcctggcagatgctggatattagacctttgtcagatggctaggttgcaaatattttctccctttctgtgagctgttcactctgttgatagtttcttttgccgtaaagaagctctttagtttaattaggtcccatttgccaatttttgtttttcttgcaattacttttggcatctttgtcatgaagatcatttccaggtcctacgtccgcaatggtatttcctaggttatcgtccaaggttttaatatgttttcattttagatttaagtttttaatcctgcctttgcctcccaaagtgctgggattacaagcgtgagctaccacacccagcgaggaagccaagtttaacgtgtgtgctccactcctccaacctggccaaagggcagtcatcatcactggccactactgaccacagcctttagaaactccccttgaacgtgctgggctgaccttcctctgatcacaggcaaggtaaccatacactcaaggccaatgatcccatctgctgtgggctgggtcatgctcccaatgcttacagaacctgggaggcagaggaaaactctgcccatcccatgggacgttacctgtaagctttgaacaccagaatcttgaggcctatctctttctggaaggctttgtcttcctctaaaccaggaagctggagcaattccaccagattctgtacaacagatgcaacaagaaaattcatgaagaatagatcttaggttgaatttttcacagaagaccttgtaagaacagacaatggtgaggaaaaaaaagcccgaggtcaatacaatggggaaaagcctgtgaagtgacctggcagcagccacacctgctgtcacctccattcccctctcatcttggaaacagatttgccctttacaactcaactcatagctcacccgccttcagagacttcttggcccatcttagctggaagggatctgttccagcgctgagcttttattttgcttagcatctactcagatgccttgactgtgtgtgtctcacagtcctactgactgacaaactccctgggggccgagatggcatggattcaggtctcagatgctctatggcacctgggagcatcttacacaggtgaagtgctcagtgatgatctggggtcactattctctgcagatcagcatgtctgagaggtaggggctcacagactgtggaactggtgtaagacctttgtcttttcccagctactaacaggtcctgcttgtcacagcccctccatgatacaaagttaagtcattttatgtctgacacaggcaaaggaaaacgacaggcccttgccttcccggtcctcaagggtcagctgtaagatgatgtcataaagccggatcaggtcctggggccggggggaagcacttgctgtcatcctctggctgctgctgcagcagagccctctgcagacctttggccatgctctcattacacttgattgccattgacagcttgatgtaagtcaggtaggtggaatgcaccacacatcagctcaagttgtactcagagaagcagaggaactgggaggactggactacgagttggggctgacccagaggaagtgggggggtgagttggggcaaggccacagcagggccatttggcctgggcttcaagggaccctgtaatcccaactacttggcaggctgaggcaggagaatcacttgaatccgggaggtggaggtttcagtgagccgagatagtgccacttcactgcagcctgggcgacaagagtgaaactccgtctcaaagaaaactaaaataggctgggtgcagtgactcacgcctgtaatcccagcactttgggaggccgagatgggtggatcacctgaggctgggagttcaagaccagcctgaccaacatggagaaaaaccccatctctactaaaaatacaaaattagctgggcgtggtggctcatgcctgtaatcccagctactcaggaggctgaggcaggagaattgcttgaacctgagaggcggaggttgtagtgagctgggattgctccattgcactccagcctgggcaacaagagcgaacctccgtctcaaaaaataaataaataaataaataaaataaatacataaaataaataaatacataaataaaatagatatgtatttatgcaaaccatagaaaaatgtttggcaaccatcgcaagatacctgacaatgtgaaatagttttattacaactggcctgaccttcaaaggccttcacagctcctgccttcatgttaccgtctactatgttcctcgtgcaccttccactcagcacaaacaggctgcactgcctccgaaacacatcacttgaatcctgcctctgctcctttgtccatctgaatcaccctctccacatttctgaccctgtaatcctgatctcacttcatgaggcagttcgcttctcttttgcatttagctttccccggggtacactgtcaatagcctactgtctgatgtcatcagtcagcacttcatcagaggcaattatgtccacagagcttttggctaattactgtcactcctctttacatgtgtgcatatgcatatcatctttccctaatgagactggaaatcatgattcattccctggagcagtggtttccataagtgaccaacccacagaccagtgcaaactggctgcaaaagagcttcctctgaggaacttattagaatgcagattctttgactgcatgggagaggaggatctcataaatctgggtgtaataggcacagaacgttaggtgtaatatgggcgggactctggactcagcatatccaacaagctgctggctgattccgacgatgccgatgaattgccaggttgggaactgctgcccccagagaacctagcagagagctctgtacgtggtaggtgctcactgccctattgtttgggtgtatgcctcctgataatgaacttgatcataacattattgttgcattatgcctgtattgtttccttaagtgaaggaagaatgcttttgagtacctaataggtggcaagctctgtgcctacttacatacatgaactattccttttaataacctttggagataaagtggcatttccattgggcattggaaatctgaagactttcgtttacagctgttgcaacagcagaactagaattcgacctccgacatttctgctcaccagagggcatgaactgctggtttgtacctggcttgcagataccttctttgggcagcacaatgttcaaaattaaaaaaactaccaacacttctaaactggatactttgtatcaatatctgggtttctggcttctcttcatgggaaaaaaacaaacaaaaaaaaaggtttggtgaacactggggcccacattcctgcagggcaacagtcacatggagactttagatgggcacgtgcccagaacacactagagtccccatcggtccccattctcttacattctattcccaactaggttcttataggcctgggtttgtgcctgttgcacacttatctactctcttgcttcccactggtcaggaagtctggcaaacttaaaaggcctctttttgttgctctctcctgtatggatctctcatcatagaggtgtgtgcatttctgactttgtgatttcaatactaaggaagctgtcggcacattatcaaggaaaacggggatcgctgctccccaacgtacacattctggtgtgccccagtaaaattctgtattcagcctccaaactagctgggaaaaatgtggcaaatcatctacttgctccaattcaatggtgtttagaagtaggaagtcactgtgagcaatgccaccaagtggtggagagactccatgcagaatcgccaccttcagccagagaggctgggaggccgaagacctctctcaatgcacagggccattcagaaactagaaacaaaatgcttgctcatctccctaggccactccttccgaggctttttgagacaaggtctcactgtcacccaggccggagtgcagtggcacaatcaaggctcactgcaacctcaaccttctggtttcaagcgatcctcccacttcagcctttcgagtagctggaatgactacaggcatgggccaccacacccagctgatttttttttttctttttagtagaaatgaggtctcgccatattgctcagactggtcttgaaccaacacatttttagctttttaaaagacagccttggccagccatggcagctcacacttgtaatcactgcactttgggaagctgaggtgggcagatagcttgagctgaggagttcaagaccagcctgggcaacatggtgaaaccccatctctacaaaaaatacaaaaattagctgggtgtgatggtgcacatctgtggtcccagctactggggaggctgaggtgggaggattgcttgagcctgggaggtcgaggctgcagtgagctgtgattacctcactgcattccggcctgggcaacagagaccctgtctctatttaaaaaaaaaaaaagaaagaaagaaacctaaaaacagactggcacttaaaagagttgtgcttcattttttgactttctgtattaattttgtttgttcctttccttaaacaagctgccactgctgctgattcaacatgtttcattttatactttttttttttttttgagacagtttcgctcttgttgcccaggctgcagtgcaatggcgtgacctcggctcactgcaacctctgcctcccaggttcaagcaattctcctgcctcagcctcccaagtagctgggttttcaggcatgcaccaccacacccggctattttgtatttttagtagagacggggtttctccatgttggtcaggctggtctggaactctcaaccttaggtgatctgcctgccttggccttccaaagtgctgggattacaggcgtaagctactgggcctggcccattttatacatttttaatgtgtattcttgtttttggaaaatgtgaccagaggactattaaactcttttagcatcagtgtagcaaggaggtaaaaaaacaaacaacaaaacaaacaaaaaaaaccctttttgtaaaataggtttgagtatcgttggattgagcacttaccaagcaactgtgccaggcatttgtgtccttcatttaattcttacaagcctgagtgttcggtattttaattttataggtgaacaaatagaagctgagggtgaaggacctacagctgtcacctttatctcttctcaacactgccaactgtccccttggatctcccagacagacaacaagggacatctctggtttctcggtgccccctagaaacctcgggtcatttcaaggcattatgcaaatgagaagctttccttctcttcacctcatctcctgatctgcacaaaagtgactgtaggacccagtgtaggtaccgatgtaggcaccaatcctcagtttaccacctgctctctacttgcttccctgccataactttctaaaagggatgtgagccatgtttaaagtcacctggtcactggagggatcttgttctaccctctgtagtagtacctctgtagggtagtacccactgtagggatcttgttctacatcagtggttgccaacctttttggcaccagggactggtgttgtggaagacaattttccacggactggggggatggggggaatggtttcaggatcaaactgttccacctcaaatcatcaggcattaaattctcgtaaggagggcacaacctagattgctagcatgcgcagttcacaatagggttcgttctcctgcgagaatggcatgccgctgctgatctaacaggaggcagagctcaggcggtaatgggagcaagggggagcggctataaatacagctcaccgctcacctgctgctgtgcagcccggttcctaacaggccatggacggtgctggtctgtagcccaggagttagggaatcctgctctacagagtttccaacctcagagatgaagcatcccctctgtaagtcagaaagaaattattcaagtaggagaattaaaacaggatcacagagagggaagctgaagaatttgacattctgtgtttacttgtatgaggaaaaacagcacatagaggcatccacagtaattaatttgtttggataacagttacagataaacaggtacaccccatatacaattaccaatactttttatacagttcatatttcagtacatcaacactgttttatttacactctatttatatacattaacatctttttaaattgggattattgtccatatgttttatattttttattccagtgatttcccttttaggaatttatctgaggggagaatactctgtaattactccataatttgcaggcaaatatcatcatagcattttttaggagagtaaaaagttattaacaacttatatttgtctcacattagaggaatggttaaataaagcatggtgtattcattggataaactataatgcagttgttgaaaatgattaccaggagtttttgctaacatttatgggaacatgcttatgatatgtgaacatttttttaaaaacaagacataaagttgcatatactggaaataataccttcaatattgaaaaaaatactatttaggaaaaaggacagaagaaaatctgccaaaattttgacagtggttgcctttgtattaagaatataaaaggattccatgcctttttacatttttctctgctttccaaaatttccacatgaatattatgcctagtaatcagaaaaaaatacagggacactcactcttatcctttacatttctctcctgtttggacctcagattcctcagtagaaaattaaactagatgccagcctgggcaatatgatgtcaccctgtctttacaaaaaatgcacaaattagccaggtgtggtgttgtgcacctatagtcccagctgcttgggaggctgaggttggaggattgcttgagcccaagagatcaaggctgcagtgagctgtgatctcgccactgcactccagcctgggtaacaaagcaagaccctgtctcaaaaaaaaaaaagaaaaaaaaagaaaaaaagaaaattaaactagacaaattcttaagcctgtctctctttttttttttaatagtcttatatgaagactattacttcatttcctgtgttttgtgttaagatgagctttaaagcaactctgaaaaagaagagggtgcctataagtaattcatagactgtttaaacaatagtagaggatctaagcatagatcccaagaggtaaagggaatctttatcactttgggaacttttactgataaatagaaattactgtcagtacagtccacaaatatgttgtttatcagccatctttcctccctgtcttcctctagcactgtagcctgtgttccccagaaaatatagtcaataaaattcaacattctttactagcttactctaatttgtggttggccataaagtattcctggtagagataatagagataatatttaactggccatgagaaaggaaacactatcgtatatgatacacccctttttctactcattccaacaacgatgatacagcacgtttccttttgaagcacgtgttttttccttgagtgaccagttcaaaagatgatgacagttaatatcttgttactacagaatttgtactcaaaaaagaagtctataacccaagtccaagccagatttctttttctaaaaaaagaattttcctctaagttcccctttttaaatgagctttttagcctggataattatgcagtgctagaaccttaactgcatgatcaaacccaaccttgcttgtttataacagcatttgacagcctcgtgactctcacatagggaaaaagtctcgcctgaaaacccatgctaagctgcatgtcttgagctgtgccaatttgtattccaggcagcctaaggttcccatcgtgagtttcaggaagggaaattcatggaggaagttcacctctggaagggtgaggagcaataaatagggtgggtgatggacatatgtgacgtttgccacagagaggcagtcagtatgggccttgtggtccgggctctgctttgggacacaaatataaactgtgtgaagtcttatggtagcattcataaccctgatgcttcacccaccttcccatacattagagggacaaacagaaggatcccagctctatggttcttgattgtttgtcaggtagcagccaggcatggagagggaaaaattctttcttttctgctgcactctagatccttccttctctcctccttcattctacaccacccccaacacatatccctgcaccccgcccattctttgctctctcctttcttacacttaactccttcttgctccacagcctaacatgctgattaacaggaccccaaaggtttgggtgggtattaggggccttctcaacaaaagcagcacactcttgagcttgttcttccttttgttgccatctcagataaaaaggccccatgagggaggagacagataagtatagacttggtattctgataactctgtgttacatgggatcagatgtaaatgagttgtaccctgtgatgtttcatgctctgctgtgttgtcttctcatggtgagcttttctgtgcccttatttcatccagctctggtttctgtgtttcatgttatttctcctagcctctgtaaactctgcagcatacgaataatgctctggctttctgattaaagataaatggcttactatcatcacccctggcttgagggccagctcacatgtaatcccttataggattccaaagttgttaaataaatgcagttctttttgtcattttgaagcattcaaaaatttttcaagaaaagctatgatcatataaatagaaattttatccagaatgttacaatgtaacatttgtgaataaatgtgtaggtgctgtatttgctcagactctagtttgggttgtgttttcttttccctttttttttttttttttttgagacagggtctctctctgtcatctgggctgcagtgcagtggcgtaatcacagctcactgcaacctctactcccaggctcaagcaatcctcctgagtagctgggactagagacatgcgccacaacgcccagctaatttttaggtttttctttcacatagacagggtctctgttggccaggctggtttcgaactcctggactcaagcaattccccccacctcagcatcctaaagtgctgggattacaggcctgagccaccatacccagccagttatattttctttttccttatatagagtaaaataagggtgagtgaccgagaggttgatgcatagctagatcaccagtttaaatgccttcccacacacccctttcctcctgttccctccacctacaggttgtagatgagcatgagagtgtggagcagagtcggcgagcgcaagtcgagcccatcaacctggacagctgtctccgtgctttcaccggtgaggaagagctaggggaagatgagatgtactactgttccaagtgtaagacccactgcttagcaacaaagaagctggatctctggaggcttccacccttcctggtatgttacagtcctgcctctgagagagcaggaatctagcataaaagaaagaagacatgaacaaacaggaggttttgttatttttgagaataagacttttcctgcagcagtgtttaaaacactttctgtacaaggtttttatgttgaatacagagatgaatctttctacaaatatttggtagttccttttcctaaagaacttacaacctagaagaagagatcaatcatgtagaccagtaactgcaattcagtgtgatgtgagaactgccacaagggttacaacgtggtgaatttgaacttcaggagagggtgaacttctggctctgtggagagaggaagctcaggctagccctttgtggactctagaagagcaactgagcccggagcccccaacacccactgcacatagtcatgtggctgtggcacgctgctgagttgagtgtgtgtgcacaagcacaccagtgcactagggcctgtgtgttcttttagatttaatttacttctgccttctcccttcatggattaggagactgtccttttgtttgtcaggagagtttgaaatgacaaatcttcctattcattaagatcagtgtaactgtaaggtactggcctattttaatcagatatttatatgtatgttctttcttttttttttttttttttttcggagacagggtctcactgtgtcacccaggctgtagtgcagtgttgtaatctcagctcaccgcaacatccacctcttgggctcaagtgattctcttgcctcagtctcctgagtagctgagattacaggcatgcaccactaccacctggctaatttttgtacttttagtagagatggggtttcaccatgttggccaggctggtctcgaattcctgacctcaggtgatccgcccaccttggcctcccaaagtgctggaattacaggcatgagccaccatgcccagccgtattttcttattctaatcatgtctctgtcacactactctgtgaagctgaatgtaggtttttcttagaccagaacagcttcccagggaatgatgcacaagaaattaataacactggttgtcagctagctccacagataagaactagagggaaggggcaggcttggggacaaggtgggtggggaggagggggagaccttttttttttcttttgagatggaatctcgctctgtcgcccaggctggagtgcagtggcaagatctcagttcactgcaagccccacctcccaggttcacaccattctcctgccttagcctcccgtgtagctgggactacaggcgcccaccaccacgcctgactaattttgtgtgtgttttttatttttttttttttagtagagacgaggattcactgtgttagccaggatggtctcgatctcctgacctcgtgatccacctacctcggcctcccaaagtgtggggattacaggtgtgagccaccatgcctggccaagggggagacatttttaaaaaaattgaggtataattaacatacaattaaaagcatagatttttaatatccagtttgatgaattttaacaagtatatattttcatataatcatcaaataaaacaagcagagcggtcatgtagcccagtaactgcaattcagtgtgatgtgagaactgccacaaggggtacaacgtggtgaatttgaacttcaggagagggtgaacttctggctctgtggagagtggaagctcaggctagccctttgtggactctagaagagcaactgagcctggaggcagtacccactgcgcagtcacgtggctgtgccacgctgctgagttgagtgtgtgcacaagcacaccagtgcactggggcctgtgtagaggcctttaggaaaccatatttttgaagtctttaaaaaataatgaagagtaaatgttctgttatatattcccaaacattcacatgtatttgacttgttttttccatgtaaattttgtatcttcagaacgctttaatgcaatgttttctacctttacttctccagattattcaccttaagtgatttcagtttgtaaatgatcagtggataaaatcacagaaaattgtcaaatttcctcgggaaagttttgacctgagtgcttttttggtaccacgagacccggctctctgccagcatcaaccactcacaccccagggggatgagctctccaagcccaggattctggcaagagaggtgaagaaagtggatgtgcagagtttggctggggaataggacatgctcctgagcaaaagcccatcctcactcagcgctaacatcagcagcagcccaaaaggtgaggcctgggggccttatgcagttgctttcttgggactcctgtaggctacatatgtttctctgtcttctgttctggaacatcaggttggttgggtggaaggaacctatctggaatcagacctatctgtatttgagctttgtaagttttatcaagagattcagcctccctgaatctattttctcatctgtaaaatggagataatgccaggtttacagagttgagagtttgacacatggagagtaaagcacttcacacagtgcctgatgtatggtaaacaggaatggtagctgctgtcttgtccccttatagtgaaagttctgaggttccccatctttcagggggtctagaggatcaaaactctttatttatttatttattttattttttatttttttgagacaggttctcactctgtcacccaggctggagtgcagtggtgcaacacagatcacagctcactgcagcctcgacctcctggggtcaatcaatcctcccacctcagcctcctgagtagctgggactacaggcacgcaccactgcacctagctaatttttgtatattttgtagagatggtgcttcgccatgtttcccaggctgggctcgaactcctgcacccaagtgaacctcctgcttcggcctcctaaactgctgggattacaggtgtgagccactgtgcctggcccaaaactattttcataaaaatactaagacaatatgtgccttttcacttttattctctcacagatgtacaatggtgtaagagacaacatgacgtggaataatatcgtcactttgacagtgaagatctgtgctaatgtattgtactttttcatgcctcagttttagtttctaatacaggaaatattgatagataaaattcacataaaagttctaaaggttctcagtaatttttaaaggtataaaagggggtaggggtaagaggctataaccaaaaagtttaaagccttacaggatttttgtgagacatagaggtaacaatggacagcaagaaattcccagtaccatgcctaacaataggaagtactcagtaaatggtggtcgcattttttgtctaattttacaaaggagaggaatatgtatttggaaaactccttactcttaataattagatttttttcaactgaatctgacataaatcatctttctgctattttctgagtccctataacctactttacattttcaggacattgttgcttatagggactcggcattgaagaagacaaaaatgtaacttacctgctacacaataggaactaaagggtagccagtcacgactcccctgtctttacctttgtgtgcacatttgtgaagctaacctcagagttagcatttggggctggcttactttgtggcatttggatttgtgaatcttttcttctgtcctgttcacaggttctccttcttcatcaagaaaaagtggaaccagctgtccctccagcaaaaacagcagccctaatagcagcccacggactttggggaggagcaaagggaggctctggctgccccagattggcagcaaaaataaactgtcaagtagtaagaagaacttggatgccagcaaagagaatggggctgggcagatctgtgagctggctgacgccttgagccgagggcatatgcggggggtgggcagccaaccagagctggtcactcctcaggaccatgaggtagctttggccaatggattcctttatgagcatgaagcatatggcaatggctatagcaatggtcagcttggaaaccacagtgaagaagacagcactgatgaccaaagagaagacactcatattaagcctatttatatgcaatttcagtaagtggtttattgtatggttttcggagagtggtctgtgttttgttcacttgtcttcatgtattcatcagcaagtatttttcaggtcctgcttatttcctagcattgagcttagtgatagagaaagttaacatagaaatctgggcctgcccaggtgtggtggctcacacctgtaatcccagcactttagaaggctgaggcagaaggatcgcttgagcccaggagtttgagaccagcctgggccccatctctacaaataattttaaaatggagcgaggtatggtggcattgcctgtggtcccagctacttggaaggctgaggcagaaggatcacctgagcccaggaggccaagtctttagagagttgtgatcactcgactgcaccccagcctgggtgatagagcaagcccctgtctcaaaataataataataatagtaattacattataaaatgattgtttatccacacaagacttggagcttatgacttttgtattttgctttttgcttattttggttttagagaaagttagagggttctaaaatattttctcacctactgatcatttacatgatcactgttctcctgctcagatcctagtgctataccctggccatagtacagttaactactaacatacatccactctcttatctcttacagtgccattcaggaattctgagtgggggccattacgtcacttatgccaaaaacccaaactgcaagtggtactgctacaatggcagcatctgtgaggtaaacattctcaatctttgaatgaaagttagaaacaatcaacagaactggggaacattttttgaaataatggactatctcttgaataggaaatagatatttctgttagaatcaatatatagatgctgtcagtattaaagaaacaaaagtgatatgcagaatagggaatgaaaacatgagtagcgaggaaaaataaagagttagttgaccgggcgcagtggctcatgcctgtaatcccagcactttgggaggctgaggcaggcttaggaggtggatcacttgatgtcaggagttcaagaccagactggccaacatggtgaaaccccatctctgctaaaaatacaaaaattagttgggcatgttggcacatgcctgtaatcccagctactcaggaggctgaggcaggagaatggcttgaacctgggaggtggaggttgcagtgagccaagactgcaccgctgcactccagcctgggcaacagagcaagactctgtctcaaaaaaaaaaaaaaaaaaaaaggagttagttaatgcaaaaaactcctatcttatagacttagaatttgatggggttggaccaagtgcagtggctcacgcctgtaatcccagcactttgggaggccaaggtgggcagatgatgaagtcaggagatcgagaccatcctggctaatatggtgaaagcccgtctctactaaaaatacaaaaaattagccaggcgtggtggcacatgcctgtagtcccagctactcaggaggctgaggcaggagaatcacttgaacccaggaggcagaggttgcagtgagctgagatcgtgccagtgcacaccagcctggtgacagagcaagactccatctcaaaaaaataaataaatacaaaataaataaatagaatttgatggggttttaggtcattctgttttgacttgtctatggtcaaaatattttctccaaagcaaacattggaaataatggggctcattttaaaggggcaggtgtgagacagccaaactagcgagcttattggaagcaatcaggtttagtaattacagagggttggtcttccctttcctggcaaggatttagagccataatagtgatggctttttgttaaaggtttttcttgccctttcaggaacgtcaccctgatgaaattgacaccaactctgcctacattcttttctatgagcagcagaggatagactacgcacaatttctgccaaagattgatggcaaaaagatggcagacacaagcagtatggatgaagactttgagtctgattacaaaaagtactgtgtgttacagcaaagctaccactctggctgctagacagcttggtggggagggagatgactccttgtagctgatacttggcaaagatgtcactgagaggcaagctaaatgtagttattttatcctgttagaatacaaattctaattaaaatagttaactttaagagtagtagtaattttattttgaagtctcatgcaagttgtctgatagagaactttcaggcagatcccaccattagcctgtaaacaaaaggtttggcaccagccacctgggaccaaataagaattcaattgtgcttgtccagatatgaacaaatatgtagtgagtatagagtttatcaataatcataacaaatattaaagatttccttggagtcaaagtaaaaaacaaaaaattataatgttgtctagggatgacatgatatgctacctcctttttcctgaagttttattccattctgttgacaagatggagaaagcaagatcatgaaggtgtgcaaatgattcttacggcatgggcgaggatttttcaatttattttttaaagtttccataccctttctttgtctttcttgctttttgtttttgcctttgtgtttatgtttgagatacaaccagtcattggtggcaggggcatagagtggtcagtctgaaagggaggctctcttaagagctatgtgccttccacccagagggagacccagtagaaagaaaaacatcctgggaaatccagctaccatggccctcccagtggaggcatcttacatttaggatacttcaagtatcctcagaaatgtattctgcacccccggccccgcccatgctgagggaaggggagcagttgccaatatttgcaccatcttcacatgcacatgttgcaacaagagcttctgggaaggtaagcagcatcggagctagatcacgtttcacaattagtggttgttcttttccgtgtttattttgcactttaaaaaagagagaacgcatgcaaatgaacttgcttgtgtgtatttgatggctctaagggctataaattacaaacaaaacacatcccagacattaggagttcataagtatatttaatgaaattggtggttttaggaagtcaactttagttttgctttgtttgcatgtccactaatttttttattttgatattagtcttttttaaaaaattttacagtagtcattgaaagttatgtttctttgtttacttcattttttcctctaattattcaagactggcacaaaagtataaatattatttatttcaggtagaatttttttcgtgtagttttttaatatatacttgaaggaaatgtttcaccttatttttggtctttgtttattcatttagaccctgcaagttgattctcattaattgtcagattccactacactttcttcctcataggtagtaattaccagtgtaactaagcatttgtgttctgatatctgaggccagtaactattaatgtctagttctcagagcatttggaaaggttatcttaaatggctacctaaattgaaatccttttcagaaaaaatataattgcaaataggtaggagtggcctaaattatctaatgtaataaagtcagacaaaatgcatactttatagtttcaagattttcagtacataaaatctgtcctttcctacctggacatgtcccattaaaaagtgggagattttaaataatttctttacagatgttttatttaagcaggtagcacaatctactaatgttgtttgatctgtgtttgttatactggttgtaattaatttttttaattcatgaactagcggaaaatttattaaattaactattaaccacattcaccttgtaaatgactgtataaaacttgttgacaatgcactgactttagaaagatgttaatgtgcataaatagagtgtaaataaaatagtgttgatgtactgaaatatgaactgtataaaaagtattggtaattgtatatggggtgtacctatttatctgtaactattatccaaacaaattaaatactgtggatgcctctatgtactgtttttcctcatacaagtaaacacagaatgtcaaattcttcagcctccctctctgtgatcctgttttaattctcctacttgaataatttctttctgacttacagaggggatgcttcatctctgaggttggaaactctgtagagcaggattccctaactcctgggctacagaccagcaccgtccatggcctgttaggaaccgggctgcacagcagcaggtgagcggtgagctgtatttatagccgctcccccttgctcccattaccgcctgagctctgcctcctgttagatcagcagcggcatgccattctcgcaggagaacgaaccctattgtgaactgcgcatgctagcaatctaggttgtgccctccttatgagaatctaatgcctgatgatttgaggtggaacagtttgatcctgaaaccattccccccatccccccagtccgtggaaaattgtcttccacaacaccagtcccgggggatggtgagcagagcagtgcaatggcctgacctaccaggtaaaggctccctctcgatcaggatttctcaacccagcactagtgacacttggggcaggatcattccttgttacggagactgtcctatgcagtgtgggatgttcagcagcacccctgacctctgcctacaagacgccaggaaggaccctctgtctgagtcatgacaaagaaaaacatccccagaccctgccaaatgtaacctggggggcaaaaacacccacatttgagaaccatggttctaggatataggagtgtggacccaggcagctcaggtttacacaggctggatttgaggtgcctgtgagacctgcttgctgagattcttttgagcagtcagacaggaggggctggaacccaggagaaaagtctgggcagctttgctgtcttcaggctcggtggctgttagaaggaatgtggcagaaaaaaagaaagcgatacccaaagagtctacttcatttaatttaaatttttgagcaaggattatgctaaagtcgccaggcaagagaccgagatgagcccacctcacaaacccagaaacctcagatccaaggcagctgtataaggtacagatcgttccggactgtagaagagagggttaatccaacttcatcaggagagaaatgccattatccactgaactatttcttgactatctcctgtatgctggtcagtttcactcacattgtctcatttaatctttgacaaactaaataaaagtgtgaagtaaatattttcccctcccttttttttaaagattagaaaacagaggctcaaaaggacccacatactcagagtcaccctgtcaatgacagaggtggagtttgaacacaggctgtttaatgccaaagcccaatactggcttctggaagcttctagaaggaggggctggaacttcacattgaagacgttgaggggcagtgttgcaggaaaatgagagagggaaacataccaggcaaagggaactgcttgggcatggcttcggcagagaacgaggtacagagatttgaggacaggatgatttcttggaacacagagcttggttcagtagaaagagcccaggaaagccaggatgtggccagttgaaagggaggggctttgagccattttgcattttactctattggcatcaaggagacaagtaatgagaactctgacttgggaaaaatgttaaggatcaatttatctcaaatatcacatgtagctcttaagtctgagggccctctattcctcatcttacctaaaaggcacgaacacacctctccaagtcaggtatagggcccccaacaatagttgcctggtcaaaaaatgtatcctcagagtttactactactacagtaaatctggacacagtttctgaaaatttttgtttccctaaaagtttccatcaaactatattcactgacatgtaatgataatcatcaagactaaatcacatcctaggaggtatctgaatgcaaccgtgaggtgctccttcatgtccgaagatgcatttataacaatctggaaaacagtctagatcttcttggaagttagacctcaactttatctgaattttgatgataaattaagagctcttcttgtgcagtttctgaggttcttcaaaagagtgactgtttctctgtttctccagaaaaatactacaatatgtggtgtgtgtgtgtgtgtaggtgcctgtgcacatgtgtgggtgtgtgtgaatttgcctatatgtgtgtgtggatggagtaggtatacatgctgtgagtgtgtgtgtggatgtgcattgtgagtgtgggtgggagattgtgagtgcatgtgagtgtgtgtgtggatggagtaggtatacatgcctgtgaatgtgtgtgtggatgcggatgtgtgagtgtgggtgggagattgtgtgtggatgcatgtgagtgtgtgtgtggatggaataggtatacatgctgtgagtgtgtgtgtggatgcggatgtgtgagtgtgggcgggagtttgtgtgtgagtgcatgtgagtcagtgtgtgtggcgagtgtatggaagtgggtagcccatgcatagagcatttcttagcctacttgacagcttaggagccacctcctccaggaagccttccttaatctgtccttcgtcctgcccctcgggacccaggtgacaccgagtatgcaattgctctatccctgcaggcctgcccctcactcatctcatccccaaacacagacacatgcaagaatgtgaccctcccttcccaatacaacactaggacatttgattccctttgtattcccagtacctagtgcaatgtctggtacacggtaggtcatcagtaaataataaattgaattaaaccttgcaaaggcctccaaatatcagaattagtaagctctaaaggctttgtttattcctgcagattccttctcaggtttcagcaggtcatagagaacatctcttccaccagtcctagtctcaatgggacagtaaatgaaacagaaacaccaccatcccataccctccccttcagtccctctaaaatgagctgctgctgctgggagaaccagagctaagcttctgcagaggcctctgcccatgtcaccccagctccgcagtcctacctggcatgagtcttcctataactatacctaggcttcctgactgctctgtggggacacccagcctcattgcaccacaggatggggcagtcagagcagggcttcttacactttaacatgcatatgatcacctggttagcatgtggattctgatccagtaggtctgggatgaggcctgagattctgcacatctaacacgctcccaggtcctgcccatgttgctggcctgtggcccatccttccactggaagcgtttagaaggctttagtctcctcgcagctgttcaagagaccggtgcggtgcaatcgggtgctgagtcatttggtcactgccgcttcttgttaagtcaacttctatcatttcacatgcatagaagttttgacaagcccttgagtcttttgtttctttctgtacgccagtaaaaaagaaagaacaagccaggcacggtggctcatgcctgtaatcccagcactttgggaggctgaggcaggcagaccacgaggtcaggagatcaagaccatcctggctaacacagtgaaaccccgtctctactaaaaagacaaaaaattagctggacgcacctgtagtcccagctactcgggagactgaggtgggagaatcgcttgaacccaggaggtggaggtgcagtgagccgagatcgtgtcactgcactccagtctaggtgacagagcaagactccatctcaacaacaacaacaacaaaagacaaccaaaacaaaaaaaaaacaaaaaacaaaaaaccaatcctatactcattgctcccagtctactaaagcagaaagaaaactggactgggcgttaggtgacatgaactccagtcccagctctgcaggcccccaaggctctctggcctctgtttcctttcctataaaatggggtaacatagtggctgacatggttatttcaagaagagagtgtgagattgcagagagagcgtgggctttctggtgtcagaacaagtttctaatgaggaaaaatgacttgccttcttggagcctcactgtcttcatctgttaagttacaggggaaaagaaaatatgggatatataagtgtgcaatgcctgtcagctgccagaagtgcagcaaatgttaaatcccttctctgctcaaaaggctgtgatggaaattcaaaagccccttctcagtaaggccctctggacacccaatctgaaatgtcaggcccctcccccttttctctttattgcggatcactgtctaacatttgacttctttatctggcttatcgtctctccctcagcaaagggctatgccatgaggccgggaatttgtgtccggatggctcactaatgtatctgtggtgcctagaccagcgcctgggacatgaatctttgtcgagtgcatggaccagcagtgctttagatattatgctattgcgttatcagaatccatttcttccacacctctgaagccagaataatgcacgtggagaggttttaaagctgtggaaaagcagagccctagaagaaaacagcccaggctgagactctggggacaacaggagacagaagaatacttgatgatttcatagtgggaggcatggagaattaacgtagtcaagagctgcgaggcaataagaggagactcttgggcagccctcaaatagattattattcctcctcctctctccaccttaccccaggtacaagagatgaatcctgttcccccataagccagctgattccatgacacagcagtccatgcagtccccaaaatttatcccaactgccttcctcatgctcagcttccaggctgctcatttccttggcttattcaccctgcatcagtttctagtgtggcccagtctccaggatcaacacagtcagtttgggattctctattcaagctctgatattgatttcatattcgccctctggcttcaggcactcacttgggtcaggggcaccctacagtctgagcccctttcggggagagagtggaacagaacatgggtttgaggtcaggtggctctgggttctgaccctgagtccttgaatcactaggttttgctatcttggtcaatttacctgacctcagctttcctatttgtgagatacaaagagaaatattatattgtaagcttgttgtcagcagtgattctcaaagtttggtctttggaacatcaatcctatgagatggaaaaggtttttattatcaagtgagtttggcaaatgctcaatatcatatcctcatcttgggaattctcaaataacaaaagaatgggttccactttcattaactcagtttttctaaacaacaaaattcctttttgcaaggaatacctgttagcatcctgcagaaccaatgttttgtgtaatccgtggtggggaaagctgcttgggaagattagaaatgctcaacaccaggccctctgctcggctcctggcacatgcatcgtggacaccaggaagcgtgagcccctgttgcatttcttcctaatgtcaggtatgtttggtcaaacctttcctgcttctgctacaaaaaaagcattttaggctgttgagacaagtagttttcccaaatatttttgttgagcccttctcgtgaaagggaaataacacaaactgaagttaatgacatctgtactttggagcctcgctctgtcgcccaggctggagtgcagtggcatgatctcagctcactgaaagcactgcctcccgggttcaagagattctcctgattcagcctcccaagtagctgagactgcaggcacgcatcaccatgcccagttaacttttatgttttcttagtagagatgggtttttatcatgttggccaggctggtcttgaactccttacctcaagtgatccacccacctcggcctcccgaagtgcggggattacagtcatgagccaccatgcccagcccacatctgtacttttaaagctaaaatatgagcactcatgagcctagctgtgaagaacagtcactcttgggtttctgggaagtgactactcagacctgaaccaacaggagttggtgaagttgggtaacttgcccaatgtagcagagtctgagctctttctagtgacaacaccaccccacacacaaattagggtatgtcccatcatgtaggtccaggggatctgaataccttcatgtttcatccttctaaaaaaaagtccagcaatacgtatcctaaaagccttacaaaatcttcccatttgggaatgccacttctgaaattactataaggaaaccatctaaaataaagacaaagagctgtgcataaaaatattcaggccaggtgccgtggctcacacttgtaattccagtgctttgggaggatgcgggaagaagattgcttgagcccaggaatttgaggctaaagtgagctatgatcacatgattgcattccagcccgggcaacagagtgagacttgtctattaaacaaacaaacaaacaaacaaacaaaaatatattcatcacaacatgataataggcagaaccagaaacaacccaacatttggagaatagttaaatgtccaacagctagggaatgattaaatccattatgaggcttctctacattaaatatcttacagccatttataaccatgtttataaagaattttgaatgatatggaacatgcttatactatgaggttaaggaaataaaacaggctacaaaaataaaatatatgtactataataacagctatgttggtgcacagagagaaaaacatttaccaatatattaggagtggttatttctgagtggcgagatgatgagtgatttttcattctattctatatatttttctatattttcttttattctacatgtttttctgtatttccaagttttatacaatagtgatcaagaaaaggtaattatttatttaaaaagaaaaaagaagacccatgagttatcagatcccagtagacctaaatggcactacaaacactattgtgttcagaggtgtctcccctatctaagcagtgccaggttagggaacgccgcccatcaacgttctaagcagtgccaggttagggaacgccacccatcaacgttctaagcagtgccaggttagggaatgccgcccatcaacgttctaagcagtgtcaggttagggaacacctcccatcaacatttcccaaattccaggaaccatctgttccatagtgtcatatctgtgtagaacctacaccattacttaatattttcatagaaatcaactcagtttttaaaatttgattacctgtgttttaagaaaaattttaaatcactctaaatggaaaaataatgccacttgccattaatggaaagtaatcacaaaaataaatgcaataaaacaaaacaatatcattaaattctacagtggtaaaccttctgagcttgagagctgcttttgctctgtttgataaaagcaggggctgagggagagtgttttcaggcaggagggacggatttacaagggtttgagagtaagcctagcctagcaccagacccctcaaaggattcggcaagattgaaagacagtgaaaaagattttctcactagagattttgatttgtttttaatgatttgcccacctaccacccaaactgcctaggatacgacagctggggaaagtgccattcaacaaagatttgaccccagcccatgagttgctgacagtggaggtcacataagttagataagtgtaccggactgagttcctccaggacaggaactatttcttctcaagcttggtagtctcagcaccctggacagtgcctggcgcatggacttgtttgttgagtgagtgaagaaatgaatgaatactgggttgtgacagccttttccccaaagcggggcaggcgccctgagtcgctcacatcacccttggctttcagtcctcagagtacagcaagtggaagttcaccaacagccccacgttcctggagctgctggaggagttcccatccctgcaggtgtctgctggcttcctgctctccctgctccccattctgaagcccaggttttactccatcagctcctcccaggatcacacgcccacagcgatccacctgactgtggccgtgctcatgtaccacactcgaggtgagcctggggcagaggctgtggagcagtcatgctccgccccttcagttccctcatcagttcaaggagggagggaacacctacagcccagacttgttaatggtaataggaggcatgtgggagagagctctatgaaccagacagtaaaccaagccttctgtatgtatatgatcagttaccatgtagggtaggtactgtgtgcattttacatgtggcacagaaagtcacacttaagtggagagctgagatttggacctggatggtctaactgctgagtccaagtcttccaccactccactgtcccactactcttgagacaatttaatgagatcagacttggagagcacccaacccttggtgagagcccagtggtccttagtcttcctgattgtgcagcctgaacgcaggggagattctgcactggctgttcactcactcactgagctcattcagtgatggtttatttcacatctctccgtgctcagcactggggcaggtgtggaaatacaacagacatcagccctgccctcagggagcatctagaggcagcagtggagagatgagtgtagaaataattagatgattctcattgtgcagaagccaagaaggaaaggtcagcgtcactgaggacagtgaagagggggtgacgctgccatagagtggtaggccaacatctctttcaggtggtcttggctccaccactggcctctgccccccgccctgccctctgtaactgagtgttgcttggtttggcaaagctgggagctgcctacacttctgagccctctgtcctctaggaaacaaaaacacagtttctaaaaactggccagagactctgtttgtcctgctagagaacacccacccagaccaggagaggagaggcagacatgtcctgtgagagcaaactttaatcccgaggaaaaccagggggacctctgcagttggttggaggcctcctgcaagtgctgggccattgtaaaagaaatgcaacccagagaaacctcctgggtttctacaagccaggcctatgttgcccaggttgatcttgaactcctgggctcaaatgatcctcctgtcccagcctccaaagtgctgggattacaggcatgagccactgcacctggcctctttttctatttttcaatcttctgattagtcaaggatgaaatctcatttggacactatggcctctgtaacgccccacgacacttgtcaatcaccctgttcaaaaaaagagagccagctttgggctcagcacctttagaaagtaacagcatctagttagaagttaagtatttctgtatgtcatttccttctgcttctggcaagtgattatgattttccttttttggtagtaatgtaagatttcctttataaatatatttattgaaatgaaaggtgagttaatttaccaaaatgtgttaaataaatatttaaatgggtggtacaaaatatgttaaattaaaaattgaacaggtagtttaagttttgaaaattaagagaatatcattctcttttattcaatattcagagaatactgaaggcattttatgaatggttaatacatggaagactcttagatcaaggctagtgggtataattgattccctttctactttcttaaatggttttaaaccattcaacgtctttgccaagctctgctgggaagcccagaatctgccgcaatgtgttccaaggcctgggaagttaccctcttccccatgcccatgctgatgccgccactctggtcgggatgtaagccccaggtcccaggtccctgagctggatggggaagtcggtggtgctatggatgggccacgctggagagagctagcacagtggcacttccagaaccctgctctgtcatctgcaaatgtatctgtgttgggagatactaagaatagctgagacccgcctgactgagcagaagctcccagctggggcacccctggccagctaagcctcttgacagatggccctggtttccagccctggtgccaaactccaacccctgtcctcaccccgcttctccacttcccaccctctagccctgtccgaagcctcactcagcccgaggcagcaggcttcatccctcagaattcctcccagctgccagggaaagtgagctgtgcatgaggaccactgtggggtggagagcgcagtagctccccagccaggcagggctgggccacctgccagtttcatcctccctccccctgtggtcctcaaagttggcctcagtttcctcatgagaagccccttcgtgcactgttgccaagggccataaaggcagagggcttccgcctgtaatcccagcattttgggaggccgaggcgggcagatcacgaggttgggagatcgagaccatcctggctaacacagtgaaaccccgtctctactaaaaatacaaaaaagtagctgggtgtggtggcgggcacctgtagtcccagctacttgggaggctgaggcaggagaatggcgtgaacccgggaggcggagcttgcagtgagcagagatcgtgccactgcactccagcctgggtgacagagtgagactctgtctcaaaaaaaaaaaagaaaaaaaaaaaagacagagggctccctagatgaatgcccaactgctgcccacatgtcacccctgccacattggccctcgtccccctacatctggccttgttccaatacaaagaggagcttgctgtgcctgcagctcctacggtccagataggaagtcttgctccagctgcagcagggcaccatctcttcccttctcccaagctctctgcctggcatgggaagcagactgggcgagatggggccagggatgaggaaggccaacagccgtggcctgagtgaatgatttcttctaggtcatgtgacatggctcactcttccagcttctcagggctcagggtctgccctctgagccccaacttcaacacctcccatgggaaccctccaaagaatgaaccaggaatggaaaccatagagcccacggcaccccggcacctgagacccaatgagaatcaacactgcctctccagccaacatgcaaggctgcagcctggacccagtgccagcatcccaaatgcaggccctccatttggggagtggatggagtaggagagaagggctgcaaggacccagataggcagacagagggacagagagggaaccaaagatcctacttgcaagttgtccccagaggcaaaggtatcgtccactggggacatggggacctggaggcagcacaaggacagctttgctctggtcgtgggagccctcttgcttcccacaccctcaacttactccccattgctgtctgtcattgatccccaggtggggcaagtgagggacctgagtcagcatgtggctggctgctgggagagggagaacccgctgagtcacggctcctcccctggagcctccatgagccatctaggcaggtgtgcactgcccactggtgcagggctgtgggtacctgcacctgtctgtcaacactgattctttctcatacaacaggcacttgccaacactctgcccagccagaccctatcagaccacagtgaggggatggagtgggcccgcataggtgcctccacctgagtctaggcaccccaggcttgtgtctgctgggacacacctagcagggaggctgagagcaccggcttcggagccaggcaggtcatagtgtaaagctggattcttccacttatttggggaaagttgcttcccctctctgaacctgtttcctcactgtaaattcagattcatcctttattgagcacctactatgtgccaggcattgggttgagtgctggggataaagtaatgagcaagcccttatcttgatgaacagttacggaataaaatagacctgcaaaaataaacacgcaattcacaactgaggtgagcacggttggtgggggaatggagagcacataataaagggtgtggcatggttgggggcatcagtgaccttctccctgagaaagagacacttgagtgaagggggaggagaagtgagccaggagaaggaaaaaggggaggggcatacagcatgtgcaaatgtcctgaggtggaaacaagcaaagtgactgccagggcaggagtcctgtgtggctaaagggcagtgggttaagtcaagcaaaggatttcggtgggagaaaaaaaaatagttctgaccttggccaggcacagtggctcacacctgtaatcccagcactttgggaggccaaggtggtcggatcacctgaggtcaggagttcgagaccagcctggccaaaatggtgaaaccccatctctactaaaaatacaaaaattagctgggcatggtgatgggcatctgtaatcccagttacttgggaagctgaggcaggagaattgcttgaacctgggaggctgaggttgtagtgagcccagattgtgccattgcactccagcctgcgtgacagagcgagacttggtctcaacaacaacaacaaaaagttctggcctcatgaggttgttgtgaggcttaaaagagctcatattgtaaaactgctggtgtgggtccggcacgtagtgggacatcgtcctgactgtcggtggcactgtggctgcacccaacttccccatggaccatctgggcaacttgggttctcagctccgttgcttattatttgcccatccctctggcctattgagcccccattaagatcaaagacctgtgcctgtggggcctggggaggacactggatgtttggaggatcatagttccttccatcaaggaacctccagtgttgcaggcaagaccctcgttgctttgcctgcactgtcgttgctttgcctgacaagactgtcaggagagcttgagttcctaccttcagttcatggacctccaggagctctaggagacccctgaaccccatgaaactatatgaaaatgtatgtgtgcttatttgaaggtaggggcagaaggaaagatctatagctttcaatattctccaaggaatccctgatcacaaaaacattaggaatccttaacctaacatagtgcctgacatagcggcactcaatatctggtgaatgaatggacacacatgaaaatgagtgaggaaatgaatgaatatctctctgtaccctaggagacgccacatatgacctggtacacacatctatctttgtcttctgagatggcgaaagatatcctgggacctgagcccaacccacccacaggacctttttcccagtcccaggggccatagccaggtgctatgacaagctccaaagagatgcttctcccactttctccccatccccactcctaacaatgaccagacagaggtgagaattatgcaactcagataatgaagctgtattgattgccaggagggggtgagggtgaagcagggtccaggtgtgaagtgcttaggcggcaggagaggggatcttctagtgggatccgtgtccacacagggggcctcctgggcctgagcggggctgggcagcctcagttcttggtgcgaaggacctgctcgtgggtggacaccaccttgccatcgtgcacatccatgatcttggtgtggatttggtggctggaggaggtcactggggaagaggcggaaagaggacattaccagaggtggacagacaatggactaatcaggagtaaggaggccaagaaggtgaggaaactcaaactgtctcccagttgccctctcccctgattactgcttcactccctgctgttgcccaagcactgataccgtcaacacatttctttcagactagggctcccaaaggtcagagacagagtctttgtcttcagattagagcttcctaagagctcacacccagctggttccgtccatattcacccaatggagtggtctcggtgggaggagccctgcagggccctgttcatggtgctgagcaccacagcaataggatctgccacagacacccggtagaagtaagaggtgggggctgcctctcctagccctaaggagggtttagaaaatagcttcttccacccaaggaggttcccaagggaaactgggtgacatcactagagctcagcccctcacggagcccctagccaatgcctagacctgcttggggtacagagggcggcctggagcccaggcctgcagaggatgaaggtcttaccggtctctggatgactgcgatccagaggagaactgggaggaggagaggctgtgaagacagaaaagggcagggtcattagatacatggtggggccgtgagagtgccatggtggggcggattaaggggagggccaagactcattgggcatcctcgccctccagcaggcggcggtaggtggcgatctcctgttccagccgcatcttcacgtccagcaggatcttgtactcctggttctgctgctccatctcgcagcagagctgggccagctgctcctccacactgccaatcatctcctggatttgggccagctgcacacagtagcggcctttggtctcctccaggctgttctccagggatgctttctgtgagggagggaaagggaatcaaggattagtgagtgtggccattctctccctgccagttctgggtgcaccaccgggcctggcaccattcctaacatgctgagctgggactgcagctcaatctccaggttctgcatggtgtgccagagctccgaaatctcgctcttgccgctctgcaccagctcgctgttggtggccacctcgtggttcagcttctctgtctgcaaaaaagagaacaccattcacaccagaagtccccagaaggcaggtggtctgggttccttccacctcaaatgacacccaccttagtgaagaaccgttcctctgcgtccttgtggttcttctctgccatcttctcgtactggtcacgcatctcgttcagaatgtggctcaggtccacaccaggtgcatcgtccatctccacattgacatctccacccacctggcctctcagggcattcatctcctgcactgccagggacagtccacagtcaggagttccaccacggcagcagattggggttccttagtcaggcctgaatactgccctcccagaatcacaattctatcttgactctcccttccctctctctctctctttttttttttttttttgacagggtctagccttgttgcccaggctggactcaaactcctgtgttcaagtgatcctcccatctcagcctcccaagtagctgggactatgggcatgcaccaccgtacccagtctccctgcgcttcttttaagctggcttttccatatagttctcacctcctcatggttcttcttcagttaggccagctcctccttcaggctctcaatctgcatctccaggtcagctctggccagggtcagttcgtccagcaccccagcacctggcgcatgccattgatgtcggcccccacactcatgcgcaggttcaactctgtctcatacctggaatgaccccagagaaaaggaatgatacacccatcctgaccacagtgagggctttgttctcttctccctgcagcttctcccagagctggtgccttgtgggtggtttaaggagccaatcttgaaaatggcatggttgaacacagtgcccattgattgctcagatatgaacattcctggggcctggggatgaggcagttcatcttgctgcagaattcaggagggggttgcgcttctagcttcagccaacaaataatgcataagtcctccaactatgattccctcctatacttcaagggcagctggggaagtggaaagtgcctctccctaaagcagcagttctgaaacctggctgtggaccagaatctcccagctaacctgctataaatagctgaatcaaaactccaagggtggggcccaagagtcttattcttttataagcaccccagggagttttcatgcagctattctggcactggctagttctatttgggaaacactgctcaaaaaatgccctactttggggacactggatgttctggcccaccactgcaaactcgcttggtgcggaagtcatctgcggccagacgggcgttgtcaatctgcagaaggacattggcattgtccactgtggccgtgaggatctgcaggatggaaagggcacaggtaatttgtcaaatggacttcacaagctggacttcactgtaacctacattaagctcttgcttcatgttcttgcctgaattcccctttccccccacaaaacttgaccatagcagcctaaaggaaaacagatgccccaggcctgtcctaagactttgctaactcatggtcaacagagggggtagatgcagccccgggcttagaatcaaaagcccaggagttctggtcgcaattctgccactgacttgctgcaaaacctaatgggtcttggggcttcaagttccccacctccaagtgaggagaataatctgaggctccctagccctccttcctgagctggcctctcttctctctgcaacagccagccctgccagtcctctgcagagatgcacattccttttcaagctcacgggccatgggacttcaaatggaactttctcaagagataaaacccaactgacacaggggattagaaaagaggactcgggggaagaataagaagatatattggcccctgagtctgactggagttccccacatcatcattgaatttccctaatccatgcaaggcattagagcccagcagactcccgcagggagggctcccaggtgatgtgggagcaggggggagggggctggagacagggcacaagcctgccaggctccctttgtgcagggcacgtcaaggggccacactgattgtctctgcaggctctccatgcctgcctggctgtggggagggaccagactgtaccaaggcttatgggcggcggcagccacagcccagactagtgagctaatgagcggtttggatgtcttgcctggtcccgttagagcctcgctcctcccctgtgctggaaggtaggacacaagggacccagccttggctctgccattaatttgctatgtgacctgcagctggtcacagcacctctcaaagcttcaactgcttcctctgtaaaatgtaaggacaggaatcactgatctcacttgatctgaggatttgacatcagaaggggatgagcaggctggagaaggagagagcatcctctcactgatcagctcttagggcatccaagacctcgaaagaagggatctggggtgggctctgtcctatggagaaatcttaaggtgtcagtgtcctggggcatctattgttcccagaaggagctagctggaatggcaccttctgctgcccattcacccaccttgttcctcagatcctcgatggtcttgaagtagggactgtagtctttgatcttagcaggccgctgccactggtaccagtcatggatcttcacctccaggtcagcgttggcctcctccagggcacgcaccttgtccaggtaggagaccaggctgtcgttgaggttctgcatggtcaccttctcactgcccaccagaaggccatcaccaccagcaaagccaccacccaagccaccaccgaagccagcaccaaggccaccaccatatcctcctccaaagccactaccgaagctgctgctgctgctgaagccaccgccatagccgccccccagcctgtaggctcccccagaggagaagcaggaggaggagacagacaggccacccctgtaggtgctgggggcgcggcacgaccctccggccaggacggaggagatgtggctggagccgcccccgatgccgcccccgatgccgcaggagcccttcatggagctggaggaggtgaactggcggctgcaggtgctcatggtgccgaggagggaggtgagtgagcgagcagttggctgagtgaagagaaggtgctcaggtaaattggaaagggatgcgagtgctttatactcatgggtagggggcgggcctggcactttccattccccttggctttcatcacccacaggctagcgccaactcccagccaggtccctcctctcctccacctcatcatgtctgtcatattttactggaaactcattgtttggggtgttttgggctttcttgtcccgccaggcgtgattcacagggggaggtatgggcctgcaggctacactttcccatggggccccgggagtcccagccctcaggaacccgcacactgggctcagccagggtgacagagagcagggcctctgcaccttaaacctggtgacctgctagctctccatgaactggatgggcctttaacatccacttagaggaagcccaccactgcaggggacagatacccagctggagagcaccggcatggcaaggtcaccttgggcacagagaggcctccctcaccatgacccgctgttagagacaaggaggtctggggggccctcccaggcctgacctgccatgctgtgctgagaagcctgtcccatccctgaaatacactcagccagtcaggtgtatggtgattcccaccccaacacccccatcaaagagaaatccaggcagctctccccagccctgggcacagaccctaatttcctccctacggtgaggatctgacatccaccacaccatagggcgggtggcctcatggaggccaggaaacagcctggagtcaggtgggtcctggctctgccatttacggccccgtgacccagggcttggcgcttctctgagcctcagtgttctcatctgcaaagtgggagtcataccatctactctgcctactgcagtcagctgtgagaagccaatgcgacagcgtatgtgaaaggcttttgtaaaccgagtatggcaagaagcctggttggcattgttgtagcccaggcttagccccagagtggatggagctgcatccaggaacaggcctaggggggcctttttttcttccagccccagatatcctctcagacccccagaacatccctagtgtaggcagaagtctggctcaggtgccctcgtttgagccccttgtggaactggcccaggagatgttctggggaggagtagaggctggagtggtgccaggctgtgccaagggcaaggctgaagtggacacgagggtccctgactcctgaagccccaagggtcaggggacatttttaggagtccacttggtcctgctttggaggtgtgtatatcaaaagttcagcaatctcccagacaacctcccaaagcaaacccttccggcccccaccccaccctcccatcagcccctgggctccacagaccccagcaggcatgttgggaggaatgtggtcgtgtctggggctgcctgacacgtcctatctcctcagacaggccccaacagcccctgctggaggctccactgctcttcctgggatcaactgttcctagaagagaagcaggacctctctcaccccacccccaaccttgactgtcaccaaagaagaagccagagaggggagccccccactactgtggcctaggagcttggaagacaatactgagacagacacctgtgctgtgggctccccaaatctgccagcaaaggactctcgaggatgtgagtaagccagggccccaccccgctccacccacccctgacagacactcctaatctccctgcagagaatggtccccccaccctgacccagtcctacaatttccccagagagaggcaacaggggttttggctgaggggcagatgcttttgttgggaggcatgttgctgttggctgtggggcaagggaaggctgtgctcactggagaaaaatgctgtgtccagagggatctgggagtgggaatggggtgcagggcccggtacctgcttcctctgtgccccgccacccccacccaccaccaccaccgtctccttcttctgcagggatcaggaatagaagctccagagcccaggacataggaacagctttactttccctttcatttgattcagtggaacccaaaagaaactccttcctccccctgctccgaggggaatccaaaagataaggatggcagggaaccaatgacagatcagtccatgcacataatcttaaaaggcacttctgcagccccatcccaaccccacgcaccaactccagagctctagcatggaatataagcctgatcccccacacccgttctcagaaccgtggcctaacctggagcctgaggccaacctctcttcccctgcagtcaaggactcagtgaccaaggagctgcaaacagcccggccaagcagggagcagacttagaggacaccacactcccgtcccctccctgatgccaaagaagcgtggtactcagacattttaagggagggtattttctgggtcatcaggggttaaagggttgccagtcttgacagctgaggcccagagtaccccccacctctggacttctaggcaggctttgtgtgagcagcattacctgaccctccctccagcctgccccaaaaggaggggggtaaaggaggagccccgggcaggacctcctgtggttagtgagtctccctgcaccaccctacatgggggagccccgtgccaatactaaaattattgtaaatggataaaatccatggggtcaaagagatcaggaaagtagattatagcaatcaaattttggaatctggaaaacaaagacaaagaaagcccagtgcttgcccagagagaagccaagaggcaaagcatatttacactctggaactttttaactctgaatttttaagaactctggaaagtctctggaatagggggcaccaggtacctctgacagtgaggaacaagtgaactagaaatgggagggtgagctagagatctatataaaaagcagagaggcggccgggcacggtggctcatgcctgtaatcccagcactttgggagaccaaggcgggtggatcatgaggtcaggagatcgagaccgtcttggctaacacggtgaaaccccgtctctgctaaaaatacaagaaaattagccaggcgtggtggcgggcgcctgtagtctcagctattcgggaggctgaggcaggagaatggtgtgaacccgggagacagagcttgcagtgagccgagatggtgctactgcactccagcctgggcaacagagcgagacaccatctcgggaaaagaaaaaaaaaagcagaggccgctatagctcctctctcccttccttgtctgaacccaaccactccacgattactccaggagaaactagatgtttatgcttgagaatttccccaaagggactctgaatcctgagacaccaagcagggccaataaactgcaatcaactagtagcagagtagctgagactgagaccttctctgcccccttcccgcactcagcttccagaaagctggtagcttttacaatccagacagggaattagaggtattccttctgaggaagaccctccccaagaaaagtcctacagataactgtcccccaacgaaacagcctattctccaccagattactctatactgagacctaccagtggcaagctcccatgctatccacacacatatacacatattccaatcagtttctcagtgacttactcttaaatatgaacaactaccaaggaccaccagacatctgagaaaagcctctggcatgaaagatggaggcaagacaaacagcaagaaaggaactgaggaaactgagctgatgacagaaatagaagcactgctggagccaggactaataggctcaaagagatcagagaaaccattgcatcttgaaacaagaacaagagactgttgaaaaaacatgcagagctatgagagatgaaaaatataaaagattattgttgtttttaagacaggatctcactctgttgcccaggctagaatgcgatggtgtgatctcagctcactgcagccttgacttcccaggctcaagtgattgtcccacctcagcctccctagcagctggggctacaggcccaggccaccacatccagctaatttttatatattttgtagaggcagggtcttaccatgttgcccaggctggtcttgaactcctgggctcaagcaatccacccaccttggcctcccaaagtgctgggattacaggcatgagatgctgtgcccggccaaatgcagcagattttttaaaactctgaataatggagttagaggtcaaagttaaagaaatttctcagaaaacagcaacaaagaaaaaaagacaagacggaaaataaaacagaatatgtaggaaaaagagccatttcagaaagagagaaaatggagggaggaaatcatgaaacacgaaaatttgccagaattgaacaacatgagctcccacattggaagtttctgctagtgtccagccagtggatgaagtcacagctgcatcaattcaacacatggtatttcagcctgctggagagaaagagaagaactgaaaagcttctagggaagagtgtgggaataggataataagacgtgatctagaatcaatatggcataagacttctcaacagcaacaccagaagccaagaaacagtgaaactgtaccttcaaatgctgagtgcaaatgatttccaagctagaattccatacccagccaaactatcagtcaagagtgaggatcaactaaagatctttttgacacaaacagtctaaaaaaatttaaccctgataactcccttcccaggaaactacttgaggatgtgcttcactaaaacaaagggaaaaataaaaacaggaaggaggaagacattggatccagaaaacaaggaaagcaacccaggaaaaagaaggatttcaggatgatggtgaagagagattccaggatcacagctgagcaggagacccaaacagcacccagaacagacaagagcaggacagaaggccctaggagacacatcttcatgaggatgaaattgaaggaacacccagggttctaaaatactgaggagatttatgcttccagcagtgaatcaggaaacaaattaatgatcaatacatagaaagtttaggcaaattgaaaaagagatatttattccaaggaaatctaatatagtataaaatgtaatatagtataatatatgatttgactatgaataacatttaaatagtcatgataatgtaaacatttatttaacaaaaatatgaatatattgagaaggtgggaagaagatattttaaaaagaagtggggaggggcaatgctgtataacagatccacatcctcatccttcacagccagaagtcaagcgattaaaaactgaaacagaaaaaccaaacagtaacaaggtaaagcctgttatttagaagtaaggagacaaatcccaaaagaaacagctgaagttgaaaaggggaggcgggaacagagctgtggtatccagtctagggatggctttttcattaaaaaaaaaaaaaagtcttattcacaatagcaaagacttggaaccaacccaaatgtccatcaatgatagactggattaagaaaatgtggcacatgtgcaccttggaatactatgcaaccataaaaaaggatgagttcatgtcctttgcagggacatggatgaagctggaaaccatcattctaagcaaactatcacaaggacagaaaaccaaacaccacatgttctcactcataggtgggagttgaacaatgagaacacatgggcacagggcagggaacatcacacatcggagcctgtcagggggtgggggactgtgggagggagggatagcatttggagaaatacttaatgtaaatgatgagttgatgggtgcagcaaaccaacatggcacatgtatacctatgtaacaaacatgcatgttgtgcatgtgtaccctataacttaaagcataataataaaaaaaaaagtcttggccgggtgccatggctcacgcctataatcccagcactttgggaggccaagacaggcagatcacgaggtcagaagatcgagaccatcctggctaatacggtgaaaccctgtctctgctaaaaatacaaaagaaaattagccgggcatggtggtgggtgactgtagtcccagctacttgggaggctgaggcaggagaatggtgtgaacctgggaggtggagcttgcagtgaactgagatcgcaccactgcactccagcctgggcgacacagcaagactctgtctcaaaaaaaaaaaaggcttatgatgttatacatacataacttttttaaatttaaatatttaaaatatggaaggcatccaggaagaaggaatggcaactgagaggtatgggtcatatctcagtcaggtaggggtgactcgggggtttggagctgggagggacaggaggacaccaagctgggttgagactgaaggctgagtgctggaggggaatgggatccatcgccggctgttaagcaggggagtcctgatctcacccttgttcttgatcctgaccacattctggtggaaatcattcagtggaaattgaatgtggatgagattgactctcaaggggacccagttaggctgtgcccaggtctagggagagaggaagaagatctgaacatggcaatggccatggggcagcaggtgtttcctagggtgctcatcagcacgcaattcaccagctgaggggaatgaggaaggaggagttgatggggtgtgaggagaagcaggctgggagaaggaggatttcaggtctgacgaggacatcgttctcaaggcagataccactcccttccaccctccaatgtagaaactgtgtgcagatgtgggggagcccatgggtagagttaagattcaagcgtgggagtcttcgggttaaaatacctgaaaaggtagagtggtgttaaaagaaaggcatggactttgcagacagacagaactgagtttgagctccagccgtgccacttactatctgcatgattttacgcaagttactgaaactctgaattctgggggttgtcaaattccaaaatgggcctgaccacacccacctcacagggttgcaagggcaacctcgtaaaataacctctgtagaatgcctccatggtgtcagtcagcacgtgtggacactcccccatcctgtgtcccacctcccacttccatagagcgtggaggtcttccaggaagagccttcaagatcttctgagatttgtcccatttcccacatctctcaggctgtgaggctccaggaggtttctggaaagcacctgcaactcccctcccatcagttcaagaacagagatcacacaggtttgcatcaaccagaaagtcagctttattagcccatcaccagtagaggagcagggagacagctgggaactgcgctgggagagcagggtcctgacccaggccttcaggaggtgaggccagctggtgggcatgaggctgtggtagaggcagctcagttctaggagcactggccctggctgaagctggatgagccctgctccttgaggatgggccaggtctgacggttcgaagaggacgaagaggaggtgaagactgtgggagagagaagaggaggtgagaaggggtctgagagctaagccaactccagggcagggagaagggagagctgggagctctcaggagaagggcctggcccccactccatggaaacaggcagaggggttgcagtgccggggagcctcaggagccttacccactcgggaagaacaggattggccagatgcgtgtggggaggaaaggctgtgggtgagaaaaggcagggcagtcagttgtgctgagagcagcaggggggctaaagggtctgggaggcagaactgaggggcctgggactcactgggcgtcctcgccctccagcaggcggcggtaggtggcgatctcctgctccagccgtgtcttcatgtccagcaagatctggtactcccggctctgctgctccatctcacagcatagctgggccagctgctcctccacactgccaatcagtccctggatctgggacggctgcatgcagtagcagcctttggtctcctccaggctgttctccagggacgctttctgcaagtgagagagagaaaaagagtcaatggaggtggtcactcctgtccctccaggtctctgggcatgttttttgagaggtgcctggattttgatcccagttggggtactgatgggccagacaatatagagaaatgctagcccactattctagggttagtttctctatctatataacaggtcccatgagtcctctggtcccaccctgagaaaagaaaggtggaactaaattgcggcttgttgagggggtggtggccattactggtgacctgggggctgctgctgtgccgggtccttcatactatgctaagctgggactgcagctccatctccaggccctggaacaccctctggagcaacgtcacctcactgcggctgctctgtaccagttcactgctggaggccacttttttgttcagctccttggtctgagacgggaaagcagagtgaaaggtgaggctctcccaaagcccccagctgggaagtgctgcaggcccactgagggcccgagccccaccttgctcaggaaccaggcccagcatctctgtggttgtgctttgccatctgctcgtactggttgcgcatctcattcaggatgcagctcaggtccacgccaggtgcggcatccatctccacgttcacttctccaccggtctgacctcgcagagcaagcatctcctgggaagggatggcaggaggcggtcagctcagcagactcctctcctggccctgggtgcatctggcaaccccaccaaaccagcctcccatcccggaagccagcagcaaccacacctcctcgtggttcttcctcaggtaggccagctcctccttcaggccttccatctgcatctccaggtcagtcctggccagggtcagctcatccaacacccggcacaggccattgacgccagcctccacagtctgccgcagggccagctcatgctcgtaactggcaggacagaggtcaggtccttaggctgcagccctgaggattctgaggctcggggtctgctggccctgctgggtggacagctccactctatgtcccttgccctctgcccccagcccaccatgctggctgctcacttggtcctgaagtcatcagctgccagcctggcattgtcaatctgcaaaatgggctgcgcattctcaatggtggccgcaatgatctggagtgggaatggagaacaggagccctggtcaggcaaggaccttactacttgagcgtgaaaggcagaaaggggcaaaaggaacctccccaaatctggaagtcttctggctggcagggctggcatgccttctccaccagctcagggtatgcagggatgcactccatcccgatcacccccttcctgggcccaaggcagggaagcggaacttgcagctgaacccttgcaggaaataagagattcagggtaacagccccagtccgggcacagagatgctgaaaagggaccctctgccaccacttccctggatgatcctggccactccccaaaggtgcccagtctccctgtttgtaaagtgtaattgctaaaaagaggtatcccgagggccactatagccccagcctctctcagtgctccatacaccaaagtcacctaccttgtgcctcaggtcctcgatggtcttgaagtagggactgcagtctttgatctcactgggccgctgcctctggtaccagtcacggatcttcacttccaggtcggcgttggcctcctccagagcacgcaccttgtccaggtaggaggccaggcggtcactgaggtgctgcatggtcaccttctcactgcccaccagaagcccatcaccaccagcaaagccaccacccaagccagcacccaagccaccaccgacgccagcaccaaggccaccaccatatcctcccccaaagccactagcaaagctgctgctgctgccgaagccaccgccatagccgccccccagcccgcaggctcccccaaaggagaagcgagagaaggagacacacaggcccccccgtaggtgctgggggcatggcaggaccctccggccaggacagaggagatgcggctggagccgcccctgatgctgcccccgatgctgcaggagcccttcatggatctggaggaggtgaactggtggctgcaggtgctcatcgtgccaaggagggaggtgagcgagcgagcagttggctgaaaaaagggaaggtgctcaggaaggctaagagcatgctgtggctgcctccaaccccagagacctttatatgcacctggggaaggcggggccctcctaactgctgactccaggttcccctctggatttcatcactcccagtcccgtccaactcctcactctggattattcagcccaggatcaactccgctgtgtgctggctcagagttcccacccagctttgagagtgtggagctgagagaaaaacacacaaatgcgagtcggtggtgactcaggctaggtggccgggaatcaggctcccgttcctggagcacttggggccagtggggccttggcacaggtggctttgtggcaactgcgtccccaggcagtgagtcagcccttcagaagaactccctgccccacagtgacagccttggctgaaagagacctcagtgatgccatcctgggctgtcttggggagcagttgcggggatcctacatgtcccactctgggcaggggcagagttcgtgtcttcactctgcttgctgtgtggcctgaggctccccacctcccacctctgggcctgtttcccctcagtggtgaccaggctggactgggtgattgcagagtcccttctggttctaaaaatcctatgactctctttcccctcttggatctaattccagttccggaggctgccttgagcccccgggatctccagaagtgtgtgcaccatacaaacagcactggccatggagccagacaggcggcactgagtccctgctctgcccttaccagctgtacagcacaggctggtcttacagccccttggtcctcagttttctcatctgtaaaaggggatgacacaccactagccacaaagaaacatgcgcgaagcaccccaccggcccttccccaagggccagccctgcccctcatcctcctcatcctccccctccagccacctgctcctcacactcacctctacacactggcaccctcccgaaccgctacgcggggccctgcgtcccccacactcccagctgaagaacaccacagccccacacctagctcctccactcctctaccgccctctcctaatcacaggcaccctacctgcaggccggtgggagggagccccgtcctgccactgcagccaggtgtgacccctgaccccgccgtgggcctcagagttcccccctaccctgtagaaacaggactggctggggatccgttcccagcagttctctctcctgtgtccacagatcccacgctgggcctggcagctccattcatccagctgagctgggggagagcaccggtcatgggcccactcaggcacgcatggagagcctggtgtgtgttgtacggttctgtgagcagggatgacgggggcgttattcctgccaccagtcctcaggtgagggagctgggatccagggaggataagtgggcttcccaagacaccaggcactggaagctgagatgtgaacctgcctgcctgttctccttgcctaagcctgttctgtcatcctgagccctctctctgtgcatctcaaatttatatcattttcttgatcagaggggacagaggggtaaccagagacaggtggagattcactcaaagtcactctgctttaagctgcagagctgcaactagaacccagacctcagccctctccaggctcccaccatgcctgcaggtgaggccagtatacccaactctcacccacctccccacgatcactggcatgaggtctgcccagggtgggcgtggccttggcctgagaggctggtgcagcaccgaggactggagggaggaggagggatctgggcaccaagacggggcctcctcagggtgccgtggggcatcccttggtgctggccactggccttgctctgcagtgcctctgttgaggtgaggagcccagagacagcctgcctctgcctgggctccactggggcaggcaattccttgtctcagcagaaccagggttttgtcgctgctacatctcccctggtcactctgggatcagaggtaagagcagaatggatgcacatgcattcagagccaaacctcagagagggaacccgacactccccacctgaaggggtggcctgcccctccacaactgtgggtgtttctcgtggggtgggatgagagactgagaaaagaaagagacacagagacaaagtatagagaaagaaaaatgggcccaggggactggcgctcagcatacagaggacccacgctggccccagtctccgagttccctcagtatttattgatcattatctctaccatctctaccatctcccagagggggatgtggcaggacaatagggtaatagtggggagagggccagcaggaaaatgtgaacaaatgtctctgtgtcataaacaaggttaaggaaaaggtgctgtgctttgatgtgcacatacataaacatctcggtgcattaaagagcagtgttaccgccagcatgtctcacctccagccctaaggcggttttctcctatctcagtagatggaatatacaatcgggttttacaccgagacattccattgcccagggatgagcaggagacagatgccttcctcttatctcaactgcaaagaggccttcctcttttactaatcctcctcagcacagaccctttacgggtgtcgggctgggggacggtcaggtctttcacttcccatgaggccatatttcagactatcacatggggagaaacctggctttcctaggcagaggtccctgcggccttccttccgcagtgttttgtgtccctgggtacttgagattagggagtggtgatgacttttaacaagctagctgccttcaagcatttgtttaacaaagcacatcctgcatagccctaaatccattaaaccttgagtcgacacagggcatgtttctgcgagcacagggttggggtagggttacagattaacagcatctcaaggcagaagaatttttcttagtacagaacaaaatggagtctctcatgtctacttctttctatatagacacagtccgtatagaaagagacactgatctctctttctcttccccacacccacccccaccccaaagagggacaaaggggaccccggaatcttggacaaaaacctcagcgttcaggtgtcagggtgggcctggagttccagtccaaccacagacccatcaccctcagaactgaaaatggtcttcaaggtcaccaaagcctatcaataccccaaccggagagggcgaaagccttatccaggttaagcagcacaaaagtgagagagcacagaccggagccagctccaactcccaagccaggattcacaccgactctcacagtggagtctccgagaactcttcactctctgcccccaccgtgtgtgcgtgcacacacacccctttctcattggctcactgccccccgccaagttccccattccaggaggtgtcagggtgggattatacacaagcccagcactgcagacctgaggatctgcgtgggctgagaagctgcaggaagttgctgaccaacgcgccaaactgctcagccaactccatagatcacgcacctgccgtgtgcacagctctcgggggctgggggtgaagagggaaatgatgacatagtctctgaccttagaagaacttatcatttgaccctggagggaaaactaacgctggaaaatgcagaacctggctagaaaccctagggtactgggcttgcctgccacgcccacaccacaggaggcagctggggtaagcattaccccgctgagcctcagcagtagaggagggggctgccctcctggccttgatccctgaaagggtcccagcagagggaggcaccagcagggcctcagaggatctgagttgacagaggaggaggaggcgtttcctctgcatcagtgatgcacacctgccccaaggtggccaagagccaggaccactaagcctggtgagcatagagaagcccaatgggcatcctccaggcagaggattcctccccgcaccctgcctccttcctccctccttcgtcctgcccatgtcaagcatgaggcaggagatcatagcatacctgaggaggccgggaatcaccattggccaatgccatgccttggcttgcagtgattctccaaccagacagatcatcagagtccccaagaagattcgcagccctgctccaactcctgcatcagcaccactcaggacaagcctgctggtggggctgttttacaagctccccagccaactcagactgggaaggcaggaggcagcttagggggctgaggagtggggcagagaagctgaggggagagagggggctgctgcagggcccccagccctgggtggacaagccagagccacaggcttcagggcaggaggaaggaaaagtagagccccactgagccaggacagagcagcctggaatcggggcaagcaggggcgaaaccttgggcaggatattcagcctctctgagcctcagtttccttgtctgggaaatgggaataacagccctgtgtcacaggcatattaggggatttgaggccaaataaataaagcacctggcaaaggctggtggctagcgttatgtttatgagcaggtgtttataaagcacctactgtgtgcctggcactgtgctgggcactcagactcaaagaacaagacagagaagccctggagacatagtcttctgggggagaaggtggtaaagacaatcctaatacactaaagtcaggccacgatggggtgctggggccctgcagagaaacagagggagcagggttcctgggggagaacgaatgtccaggcccaggctctgcccctgtgatggctccagggatctggggaaatctgtgagtgccaggcccaccatcgggggtcctctcccctcctgcaagtttgacgccccccttctgaaggtggggctgtcatagcccttcacaatccaaccacagatctgcagcttctgccttgatgacggggtgaaacattctgtgcagtgggcagggtggctgtggacgaactgtgagtccttccatgagtcccatagctgggtccccagtccagcccaggcacatgtcctcagcagcctggacccacttggggtgcctgttctgcacaaacaaggggcccggactcctgtatgagtctcaggaaacccccaagaggggctcccattgcccccaccccaggagtgtgagcgggaagctggtgcctccagggaaggctgcagaccccagggggttgtgggagaaagagtgggcctctctcagggatgtttcttcaaatggtcactacagctcagggtgaggacgggtctctgttaagctcagttatcccctcggctctgtgcatgtggggagacctgcctggctctgctccctctgttcccctcatctccccaaaaccttggttgccgcaatagacccacactgcataagggctgagggactgttgtcagtccctcaggtccccttggggcaggcactgtctcttggggtcaggaccggtgtctcctcctttccctggactcagtgcaaaccagacgcagagcgatgtcatgccatggatgagtgtcccccaccacatccgtctccgtagaagacatgctgccaggtcaacccctgcaaggggggtccggaggcagctaccactggcatgggcctggcctgagagtcctatatgtgtgtccatcacacgagaccaggtgtggcagctctacagggcaaccacagatccgcagcttctgccttgaggacattctgtgcagtgggcagggagtgtgtggacgaactgtgagtccctccttgagtcccatagctgggtccccaatccagcccaggcacatgtccccagcatcctgggcccacttggggtccttggacaaagtcactcaagtctccccaccagcccctggcaaccactgcctctactggctcagctctctgggcacaccggggggctcccccattctggcctcctgagcctcccacccactcactttgtggagaagggcttcttccccagcagaggggcacagtctggggctgtctctggtccttcccacactctgacccctcctcactcacgccatcagtaattgtggaccccaggctctacaggagggagagatagccctgcctggagcctgaggtgggggaggagctggggcttggctcctcttcccagcacggaagcggggcccactcccctcccatgcccgtctccactactgacccctcaggctgtgggacaagggctgagtcactgctccttggagcctcagtgtccccatccacacaacaaggcgccttcccctagaccctccctgcttccggggactattcagacaaatgaagtcaccctccagaatgagccatctgcagcccagggctgttcttctggttgtggcggggtgtatggtgggggcctggtgcaaacagtgcctccctcctgccctccatggccccacatttgctgccagagagcagggagacgtcagcctccaacggagcagagcttgcccttgctttgagtcgtgcagatgccgctgcaggtgcaagtccccgactccaggcagccatctaccctgcagagagaaacactctcccgggatgtcatagctccaaggtccagggagggcttgtgaccagcccaaagtcacccataccccagtggtcagtacccacccccatccctggcctctgccagtcccaaacccccaccaacccaggctcagagggctctggtcactcccattctcctcggacctgggccccacccccagcctccaggcaccaggagagagagggtgtttgggggccttggtctgattccgcagcagcagagacaccacaggtgcagcagtgatgacgtggcggcaccctcctcccactaaccccctgcttgaagaaaaccaggaaagcaggccaacccacctggcagtttccagatttactacaaggaagatttccaggtgtcaggctcacctcccacagactgctccccacagccacgtttgctgccaccagcaagagctggggttggtcagctcatagagggtgccgggagtggctggagcaggactgttccttctcattttcctaggaggcagtttctaccctccctcacaccacccctgtccctagtggggaaccaaagaggatccagaccgccagggagagtggcactgctccctgggcacagccaccccatctgcagtgccccccactctgccctgtccgcatcctgagcaacagctgaccatgtgaggaaacatccttgagagaggccccaccctttctcccatacctgcctggggtccgcagccttccctgaaaacaccaccctcccgctcacattcccagggcagaggcaatgggagcccctcttggggatttcctgagactcacacaggagtcggggccccaatcacccagcctgcctcccccacccaccctccctttgtgcttatcccagcccttgcccacctcctgccccatctagggggagggcacagcccacaggacaggaaggagcaactgattgagtgagtcatctctgaggattcgggctcccacacctgagatcttcccatccatttacggatggaaaagcaaggctcagtcaggggaagtgactgcctaacttcccgaggtcacagagttactcacggggcaagcagtggcgacctaggaccacacctgatacaccgcctccaccccgggtctagcgcagcctggaccaccccctgaaaatctccagcccttgggagatgcgagcacccccctccaaactctccccagacttactctttatgctggtctaagctgacctctgacctgccagtcaacaacggggtctccacgcaccatctcccctcaccctcactccttcccatttcacccttttgtccccagtgcccacttcagcggccagaacaaggacacatttcatagctgagtcaacgagctttattgtcatcacgcagggaagcatggggaagggactgaagcagggggctgagggtggagaggccggagaccgcggggcagatgggaccgctgcctccctgcctcctggggggccggccaggaaagctgagtgctcagcgggtggtctggcggacctgctcgcgggaggagatgaccttaccatcctggacctcttccacaatggtaggcacctgacaggtggtcaccgctgcaggagaagcaggcaatttaaagtgggtaggggccaggaggccctcgcttgccccctagccctcatggacaggagccggctctctccctcgtcctcccccaggtgctgtgagtgcctccactggcacctcaacatcacactgcacacacatccctcctgtccctgccaccgcctcccttccatcccatccctctgccggtggccctgtgtgagtcttgcctccgcagatgggttatttgattctgacccagtgtgtcctgccagggaggagccatgtagactccatgaaatccatctccatttctctgcagtctccaggacatagatttgctcccatctcccccatcagactgggatcgccaagacaaaaaccaggcccctatctcctccattagactaggaaccctggggctagaatcatatcttctccatcagactggaatttggaggacaaggaccaggtccctatttcccatcaggctagagaccccagagacaggactgctttcgctcatccgaaagctgtcaagagcaaagatcatgagaccatgttcctatcttcccatcagatgacaatctccagagctgggacatgtctcctccatcagactaggatctccaaggtaaggaccagttccctggcccaccccatcagagcagacagcatctctctcatttgatcttttcctgagtatcaatcctcagtgctaatgggtcacttctcccacccctgctgagggacagccatcaactcctagaactcctggggactcagccccagcaacgtgcaggtgggctgcctgtcccttgcacccaatccccaaggcctcagccaccaagatgcttatgttctttcttgtactgagtcaggctgaaagaaaaaaaaaaacagagaggaaattagatgtgagtctgagagcccccccccgccaagaggcccccagccctgaccccaggctcccccactcactgggcatcctcgccctccagcaggcggtggtaggtggtgatctccagctccagccgcatcttcatgtccaggaggatcttgtactcctggttctgctgctccatctcgcagagaagctgggccagccgctcctccacactgccgatcagcccctggatctgggacagctgcatgcagtagcggttctctgtctccgccaggttgccctccagggatgctttctgcaggagggcaggaagaccaggggtcagtgagggttgtcagtgtcctcttctgggcccatccccatgcacaggactgttcctaccatgctgagctgggactgcagctcgatctccaaggcctgcatggtgcaccggagctccgaaatctcgctcttgccgctctggaccagctcactgttggtagccacctcgcggttcagctcctctgtctgcagacagaacacaggacagggttgtgtgagcctggatccctctcctcagtcaggcctcctcccaaatctaactgtggacagagtgatgcgttctcaccagcttcccacgtcccaaagcccagaaacatgccatttgaaatgttaactttttatggttaatccctgcgtgtgggaggcacagaccggaaacttgagaaccagccagaacattagcctggctcttggtgctagtttctgacttcttgagagagaggtggggactcccaagatctttaccctctgcctttattctgtgggggctccctacctccccacccaccccccagatcccagcttgagctcagctccaggtctcttgatgcagtgggtgaccctgtggtccatgcagctttctgaggagggagcatctccaagacacctggccgtgggcttactgtcagtgctaaggcccctgagccccagccccgaagagagacctctggcctgcagcagcccccaccttgctgaagaaccaatcctcggcatccttgcggttcttctctgccatcttctcatactgctcacgcatctcattcaggatgcggctcaggtccacacctggggcagcgcccatctccacattgatctcaccgcccacctggcctcgcggggcgttcatctcctatggaaaaaggggatgtggatgtgcgcatctggacccatcctgatctctcactcccaagccttcccccacgaggtgaccccactccccacaaggacccctcctttgttcttcctctgctctatctgaccctctaaatgatttttattcatctgctcagtattgcctccaccatcagactctatctcccccattagaccaacggctctccaaaataaaatctaattattaggcctatgccccaaaaatttcccctctaatttccaagcttctgtgtagatgttcagctttgagagtttgaaatgggacaagaaggagacttccttacttatcccctgccctcgtgagggaggccagggcaggtagagggagcctctgcgggcccctgggaggttccttgggtacagagaagcagtgtggtacaaagaggagtctgccctgcacgctggaccccaaggatcagggctccgcagacagggaagccctctaaggtgactaatcccagtgcgcctgctctgctctctcccacggcctcagccatggcccagccccagggctctgccacccactcctcagcatctttgaccttctgccccagccacctcacctcgtggttcttcttcaggtaggccagctcctccttgaggttctcaatgtgcatctccaggtcggctctggccagggtcagctcatccagcaccctgcacgggccattgatgtcggcctccacactcaggcacagggcctgctctgtctcaaacctgccatgggaatcagggacttcagcccaggctgcttggaattgcaggtccaggtcctggctgctcacctgccttcattttgccaggactctaaggggttggaagggctgatgagagggtcgagtggaaacgaattccagccccggggccttgggaccatcacagggccagatcctacgcccaccagcttccttacttctctctgcctcccgcctcccctccctctcttctattccctgcctaagcccagcaaccttcacaactggctgccttcactgcatcctggactaagtagtggggctcctaggactgccccaccctgagctcctgggccttgccacaagcaaccaaggagtcctggggtcaggaggggtaccctgagatcctcccccagctgacccaggctgcccaagcccacagctaggactcacttggtgcggaagtcagcagcagccagatgggcattgtcaatatgtagcaggatgttggcattgtccacggtggctgtgaggatctgcggagatgggagagtagtcaggtcatcggatgggggtggctgagcccacaccagagttctgaacagatcttcctgcctgggggcctctcttcccgcccagcccctcccttgccccgtgctgtattattggcagaggaggggcaagcaggagtctgaagggttcaaaggtgcctcttcttcccccgctactcagtaccccaccagacccccatgccaggctcagccttaaaggagaggaggcagctggctgggagtatgagacaaccagaaaagaaagggaaaatgtccccagggcagaaactgtcccagaattctagaacaagggaggggatgtgggcaaccccctcgttttacagtcagctagagggtgcccctgacaggctcccccaaaaggaggctaaaggagccctcaccaaagagtggtcccaaatcagaagtcaggacccttcctaatccctaaccctgggctccagccagcagccccgccccctgcggtttgttgagcctgtcttaagggacagcaggaggaaaggagaagccagaaaaatccccaaataaggcacatcagaggccttccccaccctgaggtcccaccccctcctttctgcctcccacccgcagcaggtgctatcgggagctcactcagacacccccactccacaactcccaaaaccccttcctgctgacccctgctccaaaggagcaagacaccacgcatccagtggcccatgggcccagccctccatctgcatcctcctgcctcatcctacaacctctccaggtggaggagctccacgagggagaaactgagtctccaaggggctccacgaggcctgtttgttcctgactcagcctactgcccccagaaaagggggatgtgggccacacaggggccccaaggcaggttcccagaagctaagccacagccaaaccacccttggctccccgagaccctatggctggactccaggcctttggccagggcaggagttggggggaagaagtgatgccccctggagacccctcccaccagcaggccctaccttgttctgcagctcctcgattatcctgtagtactggctgtagtcacgggcgggccccggggcctgcctctggtaccagtcacggatctttacctccagctcagtgtcggcctcctccagggcacgcaccttgtccaggtaggaggccaggcggtcattgaggttctgcatggtggccttctcacctccgaccagcagcccatcaacgccctcaaagctgctgctgccatagccaccgccagagccaaagctgtagcagctggagtagctgctacccccgagggcgctgcccaggccaccagcagatcccggcctgcaggagccggcacccaggccgccagacagctggcaggaggtgcgggacgagccgccccccaggccagaggagcccttgatggagctggaggaggtgaactggcggatggaggtggtcatggtggcggcggcaggaggcaggcacacaggagaagggctggaaagaagaggggccccaagtagtgtagggctgccggggttcacaggcttcctttataggccaccaagtgggcgtagcgattacaacaggctcctctgtttcccttcccctgggctttcatcaccacgggccacctgccagctcccaggtggctggggaccccctccccacccatcatcaggaatttgcctcatttctccaaatcctcgtgctgggtgccacgcgtgtgcgtgccactgctctgaggcccgtcacctgtgatttgggcgggccctccagctatgctttcccatgacctaatatggagaagaggagaatacaggacttcaccgtccccaggccctcccaggcagccaccaccccagcccggcccacctcaaccctgtctggtggggaaatgggttgcagtgtcaggtgaccacccccctgaagttgctgtctttcaccccacactgctccacccaaggtgctggcccggggctgggtgctgaagagaaagaggggaccgagagcctatcctgccttggaaactgagcccaaacccaccaggcccacctcacagcatagaaatgccatcaaggctcggagaccaacccacatcgcagataaagaaattggggctccagaggggtgcagtggccccttctgcagagtctgacacccaggaatgcactctaggggctacagttccatccagtcagcttctgaccctgccccatccctagaagcccttgctaacccagtctcctcgtgtaaacctttccccaggtttacactccaggctggggtgggcaaacaggggctcagctataggatgggggaaaggtgggccgtgctaagagaggatctaaaccaactgagaggggaatgcccccttccactcctctcacccttctgtaccccaagagacctcagggtcaggggaggggcatttctctcaggtctcagcccacaggaaacctaaaggacattgcccaagaagaggctcttacagagaccccagccagccagccccctccccactccaggctccccaagatgtggctccttgggcgggccaagtgccccactccacagccccaccctgccctgcccaccaccccaagccccgccctggatcccagggtcccgccaggcccgctgggtggaaggtggtcatgtttcagactgccaatggtttccacttcccagacaggcccaggtagccccaccagcagcggagagagattcctcaatagcccagtggctgccaagccaccaaagcaaacaggacaccccccatgcgtacacgcacagcggccaccctgccccacacacaccccgagctgggcagagccggtctgctttcctgggctagctgcctcgctctcaccccctcactcatcagtgccctggaccactccttcagaagcccctccccaccgagcccctctccttctgctcttgaacccgccctgggctgaggcagggagtgctccccaacaggtgtggtccttggaaagtctgtgtggccctcccagggaccagccacaggttgacagggactcaggggctgattcttagaaacttttcccaatacaaggggctgtcccttccctccacccttaatccttcctcctcccctctggtctttccaggagccccaggcctggatggagtgggcagaacagattggcaggtgacaagccgatacccaaacactcaataaactctccacctatcccagtccctcagcccacactgccccaaaccaatgaacagaccagatcacacgaggcattgaacttggagcaaagctttaatagcaggcactggacaaacccaggaggcctcctcagtgaggggctgcagaaagtagatacagaaagacaacaggtcatggaccagtgcccagacggacactcggggcgtggcagtagcatgctgggagctggagctgatggctgtgccgtgaccctcgaggtggggctgtcacaggcagaaaggggcctcagtgggtggagagatggacctgcttacagaagaccacctctccaacctggacttcctccacgatggcacacctggtggctggtcaccgtggctgcaggcgatggaggagggaggcacagggaacatcaggcaggagctcttccccccacctgcccctgagtctgtggtccccccagtctcccacacagaagggtcctcagcctctcccccgccttggggtccacacagcaggacagggcagcttcttaccttcccgggtgggctgcgaggccagggacaaggagtactgagtggccagcctgcagggagaggagcacccatcgacccagggatgccagccagcccaggcccctgtaagcactgctggggagaagcaggccctggcagaggaggttcccctaaattggtgaaaaatcacagttgggaatgcacagaaattagcacaggcccaagaatgaaagggcaggggttcagtgcagcaggaagaagaaaaagaaacagcacagcagtaggcctggaggcactcaccaggaatttacaaggagaagctgagcaagtggtttttccatgtcccagaggacccaaccaatagacccaattaaagcaggagagactgttgttagactatagatggacttcaccattttcggggagcaaaaagctgcaacgtgtgactaagcatggagactccaggacacactcagctgaaggcctgatcacccttcccaactgcaaacccgaccaccacccaccatgctcttcaccctgtggctgatggactcacacagtcatcggaaccagaaacccagggccatcaatgcccactccttcatatgtgttcacccaacgcttactgagtcctgaccgtgagccacgcttaccctgagatccaggcatccagtcctgctgttttgagctataacctctcttctgcgtgcaccaccttccttcccctgcccccccacccagcctccaccccgcaagacttctctggccagactccctgctctagccccctgacgcgtctctctggccccaccctgacccctctgatccatttctccctctgtagccagagtgaatgttctaaaatatcttgatgttcattcccctcttctgctccaaatccctccatggctccccattgcctacgtgatctagtccagacgctttaacttggcagtcaaggctcctcagtcagactccagcctgcatcgtcagtttcacctcctgcaaaccccacaggttcccacattcacacctcctgaactttgctggtgctcagacaccaacttctccctgggtgaagtgggcccccagcccgccccagcaggtacctgggtgcacactcaccgggcgtcctcaacctctagcaagcggctgtaggtggcgatctcctgctccagccgcgtcttcacgtccagaaggacctggtgctcgtggtcctggtgctctgcatcacagcagagctcgcacagctgctgttccatgcttctgatgagcccctgcagctgggccagctgggtcctgtaacacacctccgtctccaccaggctgccctccagcgatgctttctgtgggccaagagataggtggtgcgatgagatggacgtgggacccttccccatggcagagcactagagaggagcccctcctgtatggagctgtgggtgctgccggcacagttgggtggtagtgcacccagccactgagtgtgaagggacaggctgggtggggactctggttctccaagcaggggtctataaggctgcgctcaccctggggtgacaggtacagggtggggaggggacagaggccctaccttgctgagctgggacggctcaggttctgcacagagatgtagagctccatatctccatcctgccgctctgcagggcctctgtgttggtggccacctcgcagttcagcctctctctctggaaggcagagtgggccacaggggtttatggagactttcacaagtggggcacaggaaaggggctgttcctgagccctcgcctcccagaaccatcccctaaaccctccctggcctctatggggccccaaaggcacctgcacacaaagaccctctgcacccacgttggaccttggaggaattcagcctactctgcggtcgtttgcatttcttactcctaccgaactacagcacctcaaagacaggcactgggtgttattcttttgcacctgttgctgtccctaggacaccggacacactcagcctgtgcttgccaagggtatgtgtatgtactcaaatacacacatcctgtaaacagctgtggtggaaacccaagaccagacttgcagagaactggatctattttgcaggccacagtgaagggctgtgtgagcttgagtcctctctgagcctcacattttacatcgaagacatgaagggctggtccgactggtttccaaaagtccttccaactgggacagcctgtgaatctgccggtgttccaactgcaccagcacacggcgtatgtgcccacacgtgtgcacacctgcttacacacggccacccaccacgctgaagaaccagccctgggcatccttgcagctcttctccaccagtttcttgtcctggtcacgcatctcattcaggatgcagctcaggttcactccaggcacagtgtccatcttcacactgacatcctcgtccacctgacctcaaagggcgttcatttcctgggcagagaggacagcaggaactcacccaaggccatcctggggaaagaccctggggcctgccttctctccctcggagagacaggtacggatgacagacagacagacagacagacacagataggccaacagctcctcaccctgaaggtggagatggatgttgtcattactcaaacatacagggctatgaatatcagcaacctcccccaacacacactgtgactcgggactggacttcacccatccccaacaagtgctaagccccgagagatgacaaccccccagcacggcagagaatgaccatgggcgacctcactcactgccctgacctcgcccctaccaccgccttgcccccaccaccaaccccaaagcacaggcatgcaaaaagcaaccttacgctggtgtcaccgcaccaggccccgttagcaaatgttaatctgctggaggaaagcaattgtataaccagcctcaacgccagggggaaacaccttccgggtgtcctgcttctcggggagtaggctcccccagcttagagcagcacagagctcggctgagaaggaagccacaggacagggcatgtaagacctcctgaccgccccggcaggaccttggatctctatccttgggttcagccttggagtccctgggacctagaaccttctggaaaggagaggcaggagaggggcagagaggtggggtggatacgagtccgacagacctgaaggagggtccctgtgcagccgtagatatatcccttaacctctctgagcctcagtttcttcacaggtcaaaaggaagaaagagtatctttctcccagtttttgtatcagttgagataatggctgtgagtcacttgtagtgctgggcagaagttccttgttttaatgactatcactattataattaattataataattggcattgtgtgttcttacactgagttactcattagttagttaactgcagtgagctgagcctcaagggacaaatgaagtctatttgagaaaagggctcctccaggcctcacccagggtcctctgagggtcagagctaggcatccataaaggatgggaactggactggaagcatggcccaacccagggaggttctgggccccagcctcgcttgcttccaggtgaatttctgctgcattccctgagctgaactcacctcctcatggttcttcttcaggtagaccaggtcctccttgaggttctcaggctgcatctccaggttggctccaggcagggtcagcttgtccagcccctggggcagctccagagacccagcctcacttggtgcagaagtcatcagcagccaggtgggcatcatccacctgtagccagtatgaagctggaattaccgatcacagccaccacgatcggggagagacgtgggctccatgagaaaatgcccttggcagcctccaggagaccctccaacacccttcttgcagcctttttggaagtgagccagggtgggggtgatgagagtccccgtggtcttctctgagcaccctcctgggaatttctgggacccagccaaggccctcgggggttaaagggtgatgggggtaggatgcccaggcatgggtaaagatggatgccaggagagagacccttatgcagccgtctcccaccatgggggtcatggcctaagctgcctaggcctcactccctcttccccaatgaaattcacctctaggctcagctgccacctcctccagaaagccctcttggattacctttctgtgtctcttttccgggccatacctcctcccttctccagcccgggtgcacactcactgggcgtcctcaacctccagcaagcggtggtaggtgtcaattagttcaacttctatggaaaaagtagggaggtatctcaaagaactaaaagtacaactacctttcgacccagcaatcccactactgggtatctacccaaagggaaagaaatcattatataaaaaggcactgcactcccatgtttatcacagcataacttacaacagcaaggtcatggaaccaaggtaagtatccaccaacggttcattaaataaagaaaatgtggtgcatatacaccacaaagtactaggcagtcataaaaaagaacaaaatcatgtcctttgcagcaacacagatgcagctgaaggtcattatcctacgtgaattaacgcaaaaacagccaaatattgcattttctcatgtattaagtgagaacaatgggtacacagggagcccaggctatttatttgtgctcaaaaaaagaaacaggtggtgaggctgtgggggtttaaaggaagcaatgtatcaagtgagtgagctacagctgcgatggtgtagcattttctttgaaacatgtggctacttgagataatgggagtgctagaagcaaggagccagcaagtctagcagacatgcaagctctgcctcagcttctctcccaacactcagcttttctcccaacaggacagagtaagcagcagtaagtctcagagccttaggaccagaggggccccagtgccccttggccaggatgctgagcccagagagggcaagatcctgacttgaggtcacacagcagcaagccctggcagaactagcattccttttggagaaattcagagttcatggtccccaggagtcattcatttactcatgcattcattcggcaattacatattgagcatctactatatgccaggcccacttctagccccagcatacagcagtggacaagacaaaccaattcccacctcaaggagctgatgctctggtcacagagacagaaaagaagtgaagaagatcacattacatgatgctaaaggctagcaaataaaattacaccacatggaatgttggagtcactctgtccaaatggtggccactagccccatatggctatttgagtttcaagcaattggagtaattgaaaattaaagagtttagcggccgggcaatggtggctcacgcctgtaatcctagcactttgggaggccgaggcgggcggatcacgagatcaggagatcgagaccatcctggctaacacgatgaaactccatctctactaaaaatacaaaaaaattagctgggggtggtggtgggcacctgtaatcccagctactcaggaggccgaggcaagagaacggagtgaacccggcaggcggagcttgcagtgagacgagatcacgccgctgcactccagcctggggaacagagtgagactccatttcaaaaaaaaaaagactttagcagagctgcagccgtgcttggagcttgcagacgccacatcactgtcaccactacctcgctcccatccccgccgcagccaggggcatgctcagtcaccccgggcagtgtccccgctgtggccctgttgcgatggccaccaaggttgacaaagaggcttgcggggaggcctacaacctggcgcgagacgatggcttggccatcatctgggtgacttttaaatatgacggctccatcatcgtccctgttgggcaaggagcagaataccagcacttcatcccccagtgcacagacgagatctggttgcttgccttcgtgtgcgtcaccacgagggatgccaccctcatcaggtggatcggcaagaacgtcaataccttggtgaaggaggtcatacaggatttcgctaaggagtttgtgatcagtgatcagaaggagctggagggagatttaatgaaaagcgaactgaagaagactgggggaatcaattacaacgcccagatggagtaaccccagcttccccactgccccttgccaaagtcatctgtctgctccccggggaaggggccctcaggcctcagctaccaacccaccagcccaccagggagaaaagaatccatgagaggcagcacccgccaccctgcgtccacagcccccaccttcctgcttcccttagaacactgctgtgtcttatctcatgaagctcgtggaacccctttctttgatttttttcttttctccccctctcttttgttctaaagaaaaatcattttgatgcaagatcctgcctgtcatcagatccgaggtgcctcctgcggtaaccccttttcctggcatttctcttacatataatgaggctgcctagtgggatctgcacgacctcatgttgcttctggagcctagatttgttttgccatctcagttttcttaggtcccccttcctgtttaccactgaggggcagctgggccaggagcagcacctggtgactgcagccttcataagcacacaagtccattcctgtagtcaggcccagacctcctggaatctgccccgggctccctcatcccaccttcatccagagttgcctaagttgcatctctggcaaatgcaggattgctcagtggtgagaaggttaggtctggctctgaccgaataagggataaaatttgccttaaaacttgcctggccgggtggatcacctgaggtcaggagttcgagaccagcctgaccaacatggtgaaaccccgtctctactaaaaatacaaaaattagccggatgtggtggcgggtgcctgtaatcccagctactcaggaggccgaggcaggagaatggctagaacccaggaggcggaggttgcactgagctgagattgtgccattacactctagcctggggacagggaaagattctgtctgaaaaaaaaaaaaaaacaacctcgcctggcagtggctttgcgacagagtctgaaaccacccgttcccaccctcttgactgaaatgtcctagtgacacagagaagggcaaaggtctgagcccagagttgacagagggactatttcagggttcacttcaggggctcccaaagcaatgagggtgttagggagagaggcccagggtggggactgggaatttaaggagagctgggaacggatcacttaggttcaggaagcttctgtacaagcagtaaggatggcttgggccagagggctactcctcctgtggtgctagcggtgagcaaagccctgggctcatggcagcactaaagcccatggcttcaatcctacacctgcaccacacattcaaaaggatcattttttgttgtttgtttgttttttgttttgtttttgtttttgttttttgaggcacagtttcactcttgttgccctggctggagtgcagtggtactatctcggctcaccggaacctccgcctcccaggttcaggccattctcctgcctcagcctcctgagcagctgggattacaggtgcccaccaccatgtctggctaatttttgtatttttagtagagacggggtttctccatgttggtcaggctagcctcaaactcctgacctcgtgatccgtccacctcagcctcccaaagtgctgggattacaggcgtgaaccaccgtgcccagcctgatttgtttttaaagaaagatgagattgtcttggttcttcatgagaaaattttatatagctctttttctttttttccttgctcatttcattttggaaaagaaatctgtactgtattgggattgcgaagaacatctctgcactcaaacagtttacagaaagaaattttgtttttcaaaaaaaataaaaagaagaaaattaagagttcagttcttccatcgcaatagccacatttcaggggcttgttagccgcacggggtggctgctgtgtttgacagcgaacggggagcatttccatcactgaaggaactaccggacagggctggtgtggggagtgcacagagggctgggggctggatggccgaggacagcgacatctgggttgtcctgctgagaaggggtggccacatggtgacacaccaggaggaggggacagcaggtgcaatgttggccagacggggatgtgcttgatgtgttcaaaggacagaaaagacagacggagcaaggggagaggagagcaaggtggggctggggaggtcagcggtggggcctctggggcctgggtaaacagttttctgctttacgtggaaggcgtcaggaagccatggggagaggggttaagcaggggagttgcatagtttgaacaatatatgaagaatggatttgtgggggcaagagtggaaggaaggagccctagggaggaggctattgtgtcacagagaggaaagactgagacccgggtgatacgggggtggggaacagccatagccgaagcctcagggttctggatccagctgtgcctgaagttgatcccccctctcctccctttctcctcttggttactgggcactgactggaacacccctcattactaccacccacctatcccctccctcacaaaacacctgactgtctctcctcctatctctgtgcagagcactcagaagggacctaggcttccctcagtgccctgggcccaatttcttttcagaacttttcccccctgactgcatcccagggctgataagatagccctgtctagtcaccttggagtcctgggaagattccttaggccacctggtgtttcactgactttccccaccaggatgctttcctggagctgtgagcaggaggcaggaggaaccagctggctctgggtctgggggtggaggcaactaaaagagaaggctcagcttcagttgcaactggagggactttggttttctcttaggaagaacttcccctctataaaagggccgatgccatcctcgtgcattcacagcggaggggatctcctaggggcctaagaataaggtggaaaacctgctccctagggtgggtaccaagaggccggctctgctcctccaaagctgggcactcattctccctcaggacctttgcagctgcagttccctctgccaagaccccaggtggctcctccatctcgctccaaagtctcctcctgagtggcgttgcggattgcctgatgagcacggctccctcctcggaagcaccttgtctgtctcctgtactagaacgccagctccacaagggcagggcggttgttgatcttgtttctctctgtcccctcctgtctgacactgtgcctggcacatggtggatgttcccaggaggtttctggaatgagcagatgtctggggtgagtgtgggcaggtggctgccatgcatacagagcctgccaggccctagtgggctcagactcaccctctcactgcaccctcccagtggggatcaggactttgaggcttagagaggtgaggtcactcacccaaatggcacagccagtatgtggtggccctggtctggagaggcctggaggggacttgggggggttggaggctgggccagggcctggggacacactgcctttccgcatgacagctctccatccgtccacaggccctgcttcccctgccaagtcccacctggggcttccctgaccaccttaggtcctcaggtacaattgcactgcaaggcactggcctgtggcacacagaagagggccctgcagcccagattcacacagcaagtgaatgaggcatagctgaaaaccgtgcgtatggtggcctcagccgggccacactgggtagacccagacttgggcaggcatgtggctccacccatcactgggccggcagccctgcctcctgagtgcacctgctacacccagggcttgcaccagctttggggacaggggccgcctctccaaaaaatgcagctcattgtcagtgatggggcaggattccttcccgatggccacacccagggggggatctgtccagatggacaagcgcagctgagtgaggtgcctgaggaagtctgaccccctccatcctgtgatggatcctacctgtgtccaccccatcctgtctgactgcttcagctcactctgtctgtcccagccagtctggagccatacttccttgtagctctgtggctccttccaactgcacggccttccctgggccacttcccctgcctagaaggctctttgcccgttgtttccgtttctgctaggtcttggttacgtggtcttggttggaggacggtctctctgatcgacacccctgcccgtgggaccctctccctgtggcctccatgctcaaaatgctcattctcacctgcctcagggcctttgcacttgccctgccccaacccaagctagtctttccaggccaccctctccgagccacctccccacttccccaaacaggctcctctgcccttggcctgcagggcagttatggttgcctttgcctgtggagtcggtgctcactatggcacagccctgcctgtaagctggggaatccagccattgaggagtgcttgccaaaagaatgaatgagcacccttcagaaagggtcctggacccacatgtgtcccccaacacagtgtgtgacctgggacgacagctccccctctgcactgcatctcctctgtccactgtggtggttggtccccaagatccccaagggccctgctggccctcacctttgaagctctgggacacaattatcaagggagaccactgcctacactcccagagctgagagcacaaacaagctcttaaatcaatcagcgacatcaccttccaagtgaagaaaacaggacctctggcctagacacaaggacaggggagaggaggctgcaaacatccctgagtgagctggctaggaagggtcactagttgcctggacctggaagttgagggacccacagagaaaagcagggaatctcagctggaagatggggatgatatcaactcagaccctcagactcaacctggtgagggagagtggatatatcaagactccttacgccaccaaaatcaactctggctaagtccagccaaggcaaagcaagaagggaatgtgccgggagattataggttagctcatagaaccaaaagaagaaaagaagtaaaaaaaccacatcctggaaaggactggtttggatatgaaatttaggtagccgaactaatgggaagcccttggatgaatgaattccctctgattccatcctcaagtcactctactcaagatccaaatttccttaatatataaagagttcctacagtcaataagacaaatgaaactgcaatcgaaaatatgaaatagaaaaaatgtccacgagtatagacatgaacagatagttcacagagcaggaagtagaaatggcccttgagctgataaacaatgtttagcctaatatataaccagagaagtgcaaatggaaactacagtttaagcccatttttcacttatcacattggcaattatccaaaactgtgataacactgtgtcaccatgggtgtgggagacaagctctctcctgcattactggtgggagtataaactggtaaggccactatcaacattttttttaatgcacatgccttttgatctgaaaacttactcctagaaatgtacagggacacttgcaaatgtgctgatggccctagtacaaggatatttattgtggtgtgtttctcttgtaatagcaagactggaaacaatctaaatacccatcaatagaggttggtgagctccataataacgtagccactcagtgaactctgcaactgtgaaaaagaagaatgaggtagctttacatactgcagcctggaatgatcttccagatagactatcccatgaaaaagcatggtgcatgcatattcgtgaaagcctccatttttggtctctgaattcagaatgctcacctttgtcttgtgtggctactgtccactctccacctgtaggtcacagaagcgtgacccctcgtacctttctatgtgccccttttctggcctgaatggccttggtttccaactgtccacacctatgactctttgcagcaagactgtcatcaggctattggagcctcttggtcctttctgcagagagctggaagtgtcccactgcctcaggatggcccttcactaatgactgacatgtgtatccttagctcaggctgggaaacggagatgtgactccactccacagtcccccgagggacctgcttctgtaggattttgcctggggccacagccttgcatggcttctcccctctctgtctgctaccccctttcccttactgcgctccttgggtgcctgtccttcatcagtcactgccatacaaatcaggatctacttctggggaatgtgacccagatagcttcccccttaccctgctccttgctttttgcaggtagggtgtgcctgcatatgcaagtgtatgatgcaacgtgggcaccgtggttcttcccgtttcacaggtgagggacctagagctccacggctcgccttaggtcccaggtaggaagtggcaagcgactttgaagccacgtagtctggctccaagaacaaactcacatccactgaaaatattgaaaatagcctagagaaggtaagctccaagtacaaggaaaatctgcattgttaaagcaggccaagcatggaagaactctcatttattttcccaaaagattctattctgtagtcttcccttcataaacacacatcccactgtcagatgcaaatcctagagctagaaatggggcattcaagaaagacagagctcctgggaacagcacgtttgcagacatgggaagggaccctcccactggttttggtttctccatggctatgggcaaagcctgcctgctctgcatccggggatcttggtcaggtgttggaatcggtgggtggattgccggtacatttgcactgtgtcctagagagcctctatgcatttcaactctgattctccttcaccatctatgtgcagcccacaaccgcaggaccccgcccctggccctgaatctcccatgtcctggcgccaagcaggtgagtcagcctaggaggaggaagggctcccggaagccaagcccatgctggggtggtgagaaacaactttcctatgcaaggaggtgcctgagcaccccctgatggtcaagcctgagccccctcacctccccgaagtgtgatggaggaaaggccggaaagaggcagcagtcttcacccactgaggctgagtttctcactcatgccaagttttacataagctggggaccatgtgcttcaaggctagaggtcttggcgggcccagggccttggaggggcctggatgaccaaggggtccgtggcttaggccctgcctctgcatggggaatcttgggaaggttggaagcccacagcccctaccgagaaaggagccatgggccagatcttttgcacaaatcccacctgtgctccttgaccgcccctccccaccggggccacggtgaccaggaggcagaagcctccatccgttcacaggaccagcatcctgggaggaccctggcctgagcgagctgctgaaggggaccctcatgctggatggttggctacttggcacccttttctctgtggagcagggatgacatttgagagccaccaaagatgggcaggaaaaacaaaggccaccacaaaggaagctgaaggcagaaagagatgcagagaaagtgggagaaactcggctgtgctttgtgggggccctgcagggacatcggctcctgaagggatgagagaaagggtcccctgaactttgacactctgttcttctcaaggcctggccagccctgtggctccttagaggaatctgggtgccttctgtccctagtacctgacaagccccaggtgagaagacctgagttcacctgcgctgccacgtgtaacctgatggccctggcaccctcgcagggtttgaatagctgccctttccacctgtttcccggattttccacaccacccagaggctcatattcaaccccacagcctacaagtcagccaggggcctttggccacatgtactgatgatgagaatcactggattgtaagctgtaaaagcacaaggatggtgttttgttccccgctaccccctgcacctgaggcccagggaggattgctgctcggatgaaggagagcgagtgttcatggagctctttgcagaagccacgggaagcccttcctgtgccttctcaggtttagttctcagacagccccactttccagatgaggaaacagaggctaagaaaggagaataaacttgtccagaatcagtggtgaggctgggatttgaatcccatcctgttggactcaacacttcctctgaaaagacaggataagggagcttcctacttctggctttgggaaccggcagagaggagcagagttgggccagacgcgtcacctcccaagctctgcggcacccaagggttcccagggtcctcttcctccatttggctcttttcttctctggactctcccaccttcgaggattggactccttgcagggagcgcaaagcagagaacagaggaggcccaactgaggagagtgtgctggagcagatggagcacagagagagcccccaaaccttagcctcacctggagagtggctccctgcaagctgagcccctgtgtgcccagaagtgacataggcattcaggaaagggactgagggaggaaagaaggagccattcctcttcccaggggcgcctgccctgggttcctgagggaggctccatgtttacatctccaaaggccagtcccaaacacgccagagtgcaatgccctccctcagacccagggccatcctcggagcagccgggaggcagcctgtccactcttaccacaggcaggtcgcccaggcagcctcctcttagagctcctgaattctggagcatgaaatagaaatgtgaaaaacaggctgggcgtggtggctcacacctgtaatcccagcactttgggaggctgaggtgggcaggtcatttgacatcaggagtttgagaccaacctggccaacacagtgagaccctgtctctactaaaatacaagtaaataagccaggcatggtggtccacacctgcagtcccagttacctgggaggctgaggcaggagaatcatttgcatccaggagatggaagttgctgtgagctgagatcgcaccgctgcactccagcctgggcaagagaatgacactctgtcaaaaaaaaaaaaaagaatgagagagaaaataaatacgacaaaatgttaacaatgggtgaatgtaggtgaagagtatgtggcagggtgttttttattctcgcaaattttgtgtaggtttgaagttaccacagaatagcaaatataagaatgattcctgcagacacacgagtgatttcaactgttcacagggctcaggcaggaagcagatctcttgccctccctctgatccaggtcacttagtccagtccctgaaagcagtggatggacaaccatgccaccctctttcttcaaatacaccttattttgtatcctgccctttttgtgtagcattagatcatgagcattttcctctgctataaatgtcccctcaaatatgttgtttcttgtgactccctagtgttctacccacgatttcctcggctgctccaccttggtggaattcagtgattcttctgccttttcaccattgtaagtgatgctttgatgaaaagctttgtaggttcatctgtgctgcacctctgaccagtcttttctggaagactctaaggaaggagacaggggcatggaccactggcttttgaaggcattcggtgggtcctgccatgccgccttcccacattccagaagggtggtcccagtgaacaacccaccagcacggggccccgctccatggtgccccagcaaggccagcgtccctatacaggaaaattaaaccatttgccaattcaaggcactccagatggatctctctgttttctttgatgactgatgtgtccttttttgtttccttcagagcactaagactgtgcattttcccaggactgtcagggtggttttcttaccaatgtgtggtggttgtgagggttcaattgagtcgatgcctgcaaagtgctggcccagcacaggaaaagcacccagtgcttgctggctgtttgctgcgccacagcccaggtcacaggctgggtcagctgctcactggcagtgccactgtagccaggctgctcacctcactgagcctcagtttccttctctgtgaaaggggagcaccttcctcacagggctgtggtggagtgaaggcaggtaaagcacttaggagggcgccctcccatgcttggcactctgcaaatgctactgggatttgcacaggaaggaaattgaccctttgtcctatttattacccatagtttccttccggaatccgaaagtggagtgtggtgtggctggcagagcaggctgcccaagggagccaggagaggggaggacggaaggggtgggagccgtcttctccaaggctgctgtaatgctgacctagagaagacccccagagtggggcatgtcccacactcagctggccctgctcctgccaccaggcctggcacacatcggatgccccctgagtcatgtcgaggaaggaatgtctaacacttgaaaatattctagagccataaagatagacctggttggacccagaccaaacctcaaattgatcccaaggaagatttcacaacttcctttgagagatgcctctcagtgtcgcctggcgcgattcaggaagtccttcttgagagctaacctaaatccttcctgctcgccctcctcatgcttgggagaggaggcagcaaggagggggggacaggtgggcctctcgcctcagagcccatatgaggtcccgagaaggtgaggctgggccctgactcagcttcagcacacactatttccattcccttcccgtgactcaacaggggaggggcccgggggccactcacctctgtcttctcaacctgcaactccccccaccccttcctggattcctgtgacgcaggaatccctctggtctgtgtggaggaacccagagcaacttgagccagaagtggatgtccaagccggcatgagtcacccctcaaaatcaggaccagtgagggcctgaagaggccacaccgcctccggcagcctggccgccgctcacttctctgggaaagtggcctggagctcgcatggcatctgggcccagcctctgcctctgacctgcactgacccctgtgtcacccgcctccagggtgaccctcctcctggcattcagacagctccactcactgcttcgcacaaacctgtgccaccctggttcaaacattaaccagctgtgtgactttttagaagcccttcccatgtttaaaaaccaagctgggaggatgctgcaccactgccatcatggttctcactgaaccgtcgcaggaaaaagcatttcttgcgccatggctgtgtgcagaacaggcttcccacggctgagtccccaagccccccacagacgctgccaatgaaatgccgtcagcctcaagcatggttcttggtacccagccctggtaaaaccacgtgtctcaggccttctgaaccacagtgcccagaactctggctgggctttgtcccagaggacaagactggccaaccccctgctgagctggaagaatagctccctcagctggcagggacctgcccctgttgcaatttggactgagtaaatgctgacaggaggagcctgcgtgtcaggccaggatagacagaggcaaactctgtactctcagagagcttagaagctagagttggaaagcatgggaaagggtcagacacccaagagaaacaagtgctgatgtccaccaaaagaaaacttactgcattctataaactaaaatcaaacaaatgttctcctgcattgcatagcagaggaaaagaccaaatgactcttccatgcaacaagttagatgaatctcgcagataaagtcagacaaaagaatccagacgcaaaagagcatgcacagtatggagttcaaaaacaggcaaaagtcatctatggagacagaagtcctggtggtggtttcttggtggggtgggtgggggatggggttattgacaggaaggaggcaccagggagctttctggggtcctggaaatgttccacgtcttcatctggggtgtgatgatggggtggacacatttgttaaaacgcattgatttgcacaccaacatttgtgtactttgctgtaactttttccacactttaagaagaagaggagggaagaagaactgttggggagaccagctgggaccccctgctgctgactcgcgggcgttgccttcgtgccccatgattgtcgggccattgaggcctcctggcagcctggtagacctagaactatctaagccaataagacacagattgttggctccaccaccaatttctgagtcaggaagtctaggggggccttggaattcacatttcctgcagcctgcaggccatgctggggctctggcccaggaactgtgctttagaagagatggtagaacgtagcatgtgctgtgagatccctccaagctgggaaggacccaggtaagttcacagaggaggtgcccttgaaagatcagtaagatctgaaaatgcccaaataagcaggaactgctggttccagggagggaagtcagtgtgaggcaaagtagagaggctgggaagtgcggcgaacggcattccagccctcaggagggcagggctggcagacagatgtctgagtccatttcgtgctgctataacagaatacctgagactgggtcatttataataatcagacatttatgtggctcgtaattctggaggctgggaagcccaagggcatggtgccggcctgagcccagcatttggtgagggccttcttgctgcctcatcccatggtggaaatcaggagggtaagagaccaaactcacagtctcaaggccttttataatcagcattaacccatgcgtgacggtgggcacctcataacctaaacacctcctattaggccccagctcccaataccattgcactggggattaagtgttgaatacacgccttttgggggacacatgcaacccacagaaagaggacattgaggcttctgcttagaaggttttgttctgcatgataaagcttgaaaataggaggaagctccagaaaaatggccctcccccacccctaccaggggattatgttccaaagtcagaaagtgaggcacaaaccacatgtggtcatttacctgtgacaacctgtgattggcctatgaaggtagatagcctagctcagtgctaaagggccggagcagatgctgagttcactggctgagtgccaggtaaagccatccgtgtgcactgagtgctcatattggatgacaaacctggataaagagccctccagcccttccctgtaacaagcaggagctggggcagaagggcagaggtgcagcaaagctgggtctaatgtggggagcaatgtggggcagggccaggaaaggggcctgcagctgttggtaggctagcgggtaaacaaacccattacagtggaggtgtgctgctgaccgcctttcctacaagctcatgggccgccttcacagcacttcccctgctgctttttcagtgtaatcttacagctattctgtcaagacaccatgttaaacactagtggaaaagtcactgtgcagaattaccatataatctagtaattccgcttttgggtatataccaaaaaatacccaaaaaataattgagatcagggtctccaacagatgtttgttcacccatgtttctagcagcattctttttttttttgagacggagtctcactctgttgcctaggctggagcgcagtggcgtgatctcggctcactatagcagcattctttacaacaaccaaaaggtggaagccacccaaatggccatcaatatacaaaatgtggtctgtgcttacaatgaaatattcagtcttacaaaggaaggaaattctggcacgtgctacaatatggaagaaagtgaggacgtaatattctgtgaaaaaagccagccatgaaaagacaaactctatatgattccacttatatgagctaagggaaggggaatggggagttactgttcattggagacagagtttcaatttgaggaagacaaaaagttcttggatggatggtggtaatggttgcacaacaatgcgaatgtgcttaatgccactgaactgtgcacttcacgatggtcaagatggtaagttttatgtggacaaaaagaacacactatgtttggccaggagcggtggctcatgcctgtaatcccagcactttgggaggccgagacgggtggatcacttgaggtcaggagttcgagagcagtctggccaacgtggtgaaaccccttctctactaaaaatacaaaaattagctggacatggtggtgggcgcctgtagtcccagctactcaggaggctgaggtgggagaattgcttcaacccgggaggcggaggtggcagtaagccgagattgcgccattgcactccagcctgggcgaagagtgagactctgcctcagaaaaaaaaaaaaaaaagaacatgctatgctatgtttgtatttaggatctagtttagctacgtctaacaatagtggctttaacaagacagaggttcatttctccaggacacggtctaggggtggcagggcagggcagggctgcggtggcaactttgctccatgcagtcattcagggatccaccctcctctctcccatccctagggtgtttctctcatccatgtagctcaagacagtgcgccatcatgtccacatcctaaacagcagggttaagaaaagatggaaaagggcttgccctcctgcttaataattttttttttttagactgggtctcatagctcagtgcagcctagcctgggctctagcaatcctcccacctcagcttcctgagtagctggaactatagccacatgccaccatgtccccatgtccagctgaacttttttttttttttttggtattttttgtagaggtggggtctcgttatgttgcccaggcaggccttggcctcaagtgatcctcccatctcggcctcccatagctctgggattacaggcatgagccaccgtgcacagccagctcccacctcccttgaagcactgtcatttggggcctctgttctagaagggggtgcagttgctgcttggtgtgctgtccatcccctccacaggatggcagctgcatttaatctcccgtggccaccatggaggtgctcttctcaggtcggccttcaagagagaagcctctgcaagaagtgcagtcagctgacagcctccagctacttgagggtcctccaccatattcaaatcatcctgcccaatctgggaccccactactggccatctttgctccagagacctcctggggcctgctgaggctcacccacccagctctccagtggcccctctccttcacaagcattgtgcttggtgctctccaggctctccctgactgctctgcccctcgcccctttctcctttacagctccttctcctaacacagttcttgcatctctaactccaacctgttgtctacttcccaggggagctgaactgacacctttgccccaggccatatccccagcacacagacgagggcctagcacatagtaggcgctcagcagaatttccaagtgagcacaaaaaacatggtgggcagtcaatacatatgtgttgaactcagcaaattgcaaagcagctgggaaacagccatcgccggctcccctgagcatggtgctcccgcagcccgtgtcagctgcggtgctttgccaatgcaaacaggagtgaagagttagacccaggcccactccagctgctgggccccttgctcaacacagccccttcctgccacctgcagggtggggtcttcctgagcccgcagagggcacagaaggaaatacctgctcccggccatgcaggcctccctggcatgggcaccctgagagtcctggtcccgggagtcaggaataacaaagaggctgccagggccgggcccctgggatgctggctaagggcagagcatgcctcctggtttgctgggcaggaggctgattggactaaatgggctttgttgatgatgaccctttgttcctccatggcggctccgtctgaggagaagttttggaggctgttcattctcctgcttcccctgctgccgccccagaggcaaggagagcagcctcccagtggcctgctggttgtaagagtcaggtgtgagaggttgcatcacgtgcttctctggactcgtggtctgcaaggacgtgtgacaagtgtggctgtaggttgatgagctgtgtgtggcctggtaacgggcagtggatgagccagggggagcagcaggtggcccagccccagcgatgaacatgggggaactgggtccgttgtaggcaggaaggagacatcagcagcagcagccccggggcatggtggggggttgcaggggggccagagacaagccagagatgcctggatgatccattccgcagaaataacaatctcgaatccagggctgggcctggctgtgacttggtctggccaggggtcgtgagcagcaggtgtgctgattgtagttaagaagccatcggtgtcagaccagagtcctcgggctctgcacctgagtctgctgcgagaggaaagtgataggggctcgggcatgtcaaggaggtaggtgggcacgtgaagatggggctccaggaaggggacatgaacacagcagttcttggggctttctccttcaggggcaggggcaggaggaccgccacctggcttcaccatgaagggcccaagagcatggcatggagggagaggcagatctagagagaacaccggctggtctgcggagggaggcggaggaacgggttgaagagggaagaattcctgacacaaactctgaaatgacaaaggaaaagaatgacaaatctgattacactaacatgagcaacttccaaagaccaatcacaagaaacaaaacaatcacaaagtccccaccaacatggctgaaagtaaaacaattagctgagaagaaatatttgtcacctacagaccatgtcacagaggattttattttaaagcaccctacaaatcactaagaaaaaagccccaaagaaatagcaatctggaaaaggttaaaaagaaatagcaatctggaaaaggatacaaagagagaatgtgcagaagaagtgccagcagctgcaaaacccacgttccacaaaatcctggatcaaacaggcaggagacagcatgacaaggtgccactctctgcccatcgggtcggcacggatttaaaaacaaggacccggtattgccaaggatgtggggaaagagccctgtgggtgagggcgtcagttggacaatggctgtcaacttctagaataatcatgtgtgcttccctttgatccaagaatcctgctggggggaattattcctgtagaaatgtttgctcaggtgtgcgaagacacctgcgtaagacttttcatctcagcattgtgtgtgatgctgatgccacagcgtggtgccaagacacctcctggagaggacccagaaggcccggccacaggtgggggtcatggtgccatggtccctgcccagaggatgcctggctggtgcgggggcaagagggaggtggtcctggaggcagcgttgcctttatctacccacaggagcgcactggacaggggtcctgtgagtgtgggatcagggtcccccaggccccatctgccctctggtgcccagtggcatcgagcagttgtcttagccactctgacctccacatcctcctctgtgaaacggggtgcgacaggactacctcttgagctcctgagatcctggcatgcgtagtgctgtgtcaggcgcagttctaggccctctacctttactgggcctaggcagcctcctaccaaaggaggatgagaagacacagagaggctgagcaactgcctgaggtcacacagctgcccagtgaccgcagaggacacagctggtgtcccatccatcagtcacccaccctccccatgcaggactcgcctcttcacgtctaagcctgggacgcccgagcaggatccttgggctgcttctcccagctgcaacgatgggcaggctccaccgctggaggcctggagagtccctgccccaggagagggtctcagccaacagtggctatgggggtggcggacaactactccaaccccttgctcctcagcagggcaacctctggggcctgctccacgctgtctcccagggctccccacagcacagagcctggtgcttccctggtaactgccttgataacacatactttactggcttcttcccttccctccctctcgtgccctcccctggggcttcctgcatctcccaagccaagcacttgctctggaatccttgtcccggagtctgactctgagcccctgcctgagacagtggcaaagctggagttgggccagaaagtcgggctccagaacctactttttaaaagtttttttgtttgtttgttttttaaataaagaggcaacagggtcttggttcgctctgtcattcaggctggggtgcaaggggcaggcagcctggaactcctgggctcaagccatcctcctgcctcagcctctccaagcgctgggattgcaggtgtgacctactgcagaatctgttcagtggggcggctggactggttttgacccactgtactggtttgcaaaacttcccacccggcagtctctggacattttcctagattgtgacaaggggccgctgccaggggagagtgagggaccctttaccctctgtgcccctctgttcctggatcagagccctgacatttattgcacccacccaccccagggacaaagtcctctgcacagggcaggcagccagcccctcgaccaaggcctcaggaaggtaaagaagccgggtgctcacccgggtgagcacccatgctcaccacctgactttggtccagagcaagtggtccagggctccatcccgcctaaactggctcctcccagccccatccagaacccggggtgcagaggagcccagtggcgccacctgctggggaccatcaagaggtgctggcacctggttctctgctggatgccaggcagccactctggagcatcgagggctgtcacccaggagggctgtcacccaggagggctgttactcagaagggctctcagctagggggctgttactcaggaaggctgtcatcctgcagggctttcacccagggctgtcagccaggggggctgttacccagggctgtcacacaggaggcatgtcacccaagagggctgtctcccaggagggttgtcacccagcaagggcagtcacccaggaggactgttaaccaggagggttgtcacccaaggctatcacctgtggctgtcatccaggacggctgtcagccaggaggagcggctgcccacccacaggtgctgaggggcctttagataaggcctgcttcaagctgctggggtgtcctgtggcagccatcacacagtgtcacaaatggagtttaacacaacagaagtttatcctgtcaggccagagtccaggatcgaggggttggcaggttccgcccctcctggccccttccctggcttctgctggtggccggaagccctcggtgttcctgggctctggatgcaacctctgcctccgtcttcacgtggccttccttcctgtgtctctgtccaatatcccctgccttataaagataacagtcgccgggttagggccctccctgatccagcaagacctcatcttcccttgatcacatctgcgaagactctatttccaaatcaggtcactttcacaggtgctgggtggacatgactcttagggaggtcactactgaactcagcacagaggctcagctcaaacagggccccctccacgcagccctgccccaccccttgcagcgtcccctgtcctctgagcccagcagggcgctgtgggcggctggatgggcctgcaccacaccgcaccgggcttgctggttgtgaagcattttctctctacatttacctcacagcacgcagctgagcggcaactcctcggggaggctgagctgggttaggggccccttttcagtgccccaccgccctgtactgtcccaatcttagtgccgttcatgcatttagtaggggtgtgacagcccccaacctggtgtggacactacaggggaactttgttctgttttcaaggcactgtcattgatgtgtgggcctggaatactcagagtggagtcgggttttacaggttgaagcctggaaagaactgttgggtttctgtgtgtagcatctgctccatgacatgatatacaagaaggaagaatggaagaggctgtgatcccagctgcttagagaaagggttgcggttgcaacggtcagaatggcagcccagtgaatcccgttgtccatggtgttgaattcttggagacaggtgcctccctgccagccagcaatgtgagaaacgatgttcaagactgttttgactcaagtgttttgattcaagacagggatgggtgggacagggggtggatttctgcccaaagcacttctatgtgggaccagcagggcaaatggctgtggaccagcacgcagccagccaaagggaaattggtgtgtggagatgtgctcctgagagtcaagtgcttcaaatgtgaatcaaatgtgggaagtgccaagaaatgttatatcaggacatcattccaaatttggaaatagaggaaaggtgggcagtggggagatgacctattgttgagccacactaccccagccaggagagaaggtcatggggaacccctcttctttttgtcacaagaaaaaagtgtatgttcatagtaggagacaattatggtgatattgaacaatcatcattaaaatgatatcacgtatatttattgatgacacttcatagtcttcatgtaagccattctaaatggctgcaaaatgttcattttatggggctgaccatgacattcttaagtttcccctattgctgagtattcagagactttccagctttgggtttaaaagtgatactcgccaggtgtggtggctcatgcctgtaatcccagcagtttgggaggccgaggcaggtggatcacttgaggtcaggagttccagaccagcctggccaacatggtgaaaccctgtctctactaaaaatacaaaaattagctgggcgtggtggcgggcacctgtactcccagctactcgggaggctgaggcaggggaatcacttgaactcgggaggtgtacgtcgcagtgagccgcggtcacactccagcctttgcaacaagagtgaaactgtctcacaaaaaatagataaataaaaataaaagtgatactcaagtgcatgtgttaaattttgcccactttttggattatttcttctggaaggattcctagaagtggaattcctgagaaaaaggaaggcagggcctttgagttccttgatcagtgatttcacactgttgggccagggccaatttggcttttagctgaatttgatttggcccatgcaagcccatgccactttttaatgcacatgaactttgttttttttttaagagatggattctcactctgttgctcaggctggagtgcagtggcaggataacagctcaatgcagcctggtcctcctatgctgaagtgatcctttcccctcagtcttcagaatagctgggattacaggcatgcatcaccatgtcccgctgatttttttttggtagagacagggtcatgttatgttgccctcactgatctcaaactcctgacctcaaatgatctccagcttcattctcccaaagtgttgggattataggcatgagcaacaatggttggcctgtacctaaattttttccccacaaatcagaatttccacaaaatcgtgtgttctgtacctacatttttaaaagtaagacttctggccaggcatggtggctcacacctgtaatcccagcactctgggaggctgaggtgggtgggtcacttgagttcaggagtttgagactagcctgggcaacatggcaaaaccctctattctctaaaaaaaaaatacaaaaatgagcgggtgtggtggcatgtgcctgtagtcccagctatctgggaggctgaggcataagaatcgcctgaacccgggaggcagaggtttcagtgagctgagatcatgctactgcactccagcctgggcgacacagagagatcccatctcaaaaacaaaaaaaggaaagtttcccaccagaatgaagatttacagcttatcctggaaaatcagagctgcctaatcaatcagtgtaatccactgcattacaagaatgaaggagaaacatgatctttttttttttttttttggatacagggtctctttctgtcacccaggctggagtgcagtggcgtgatctcagcttgctgccacctccacctcctgagctcaagatcctcccagctcagcctcctgagtagctgggactacaggcacacgccaccatgcctggctaatttttgtatttttttgtagagacagggcctcaccatgtagcccaggctggtctctaactcctgggctcgagctacctgcctaccttggcctcccaaagtgctaggattacaggtgtgagccaccacacccaattgataaagcacatttattagtttatagtttatactttaaaacaaagatgataacagccctttcccaaaacaaacctcctcgcctggggactaaactgcctttgtaagactaacaaattagccacaagattagaaattatggtttaggagtcatgcagctggaggctacaagattctgaccctccccaaattgctcctggtaattacatccctattaaaaagcttaagatcagtgcttgagagattttgccaactcagcacttgatggatcaactggcaccacccagactgataaactggctcatctgattttgtggcttctatccaggaactgattcagctcaagaagacagcttcgactccctgtgatttcatctccaacccaagcaatcagcactcccaactcactggcctcccccaccacctaccaaattatccttccaaactctgatccctgaatgctgatggatcatgcaaatggagactgattggagtaataactctggtctctcctacagctggctctgcatgaattactctttctctattgcaattcccctgtcttgataaattggctctgtctaggctgcaggcaagatgaacctgtttggcagttacgtctttcctggggtgtccaccacagagtgtggaaggcaggtgtgtgggcctttctggcagctgcctgtggtttggccaagccctgcctcccccatgtccccctgggctccatcctgtctccacttgcatttaggggtggctgctgctctgggaacattagaatccagaagagagatggagccacatcagtttttttcaggcatctttctaaatgtttgtatccaagttaatcgcccttattcactgtggcattgcctttctaagcaattacctctgtgcctgctgctaaagaacttctcacccaaggggggcagcctgggcactaccctgggcattaagtcttgtgtttgatgtgctcttgtaattttactttgttagaaccaaatatttacatgatgggtttgggaatctctccttttagctcccgatccaatatgaaattcaggaaaccagtttgtgataaactgcatctggccattaagggggcccctgggtgaccccaacagattcacaccagtgtatgaaaatttgcctgcatttcggagaagataaatgggctttccctcttcagatgcctgaagggagcactttgagctgagtggtacgtgaccttcctctagccccggggccctcggtggacctgggctgcctggcaggcactggaacttccctggatgttccctcctgcaccagcaccattgcaacatatagacccaagtgtgatttattctggcttggtgtgtatgcttttccttgtgtcaaactgctgttcttttgacaattcaggaaactgttttgtttactataactttgaaaacaaaaattgtaacaaaaacattcccatgactgtgctgtagttggagaatttattacaacatatttacaccttccttttccctctcattttcaggagctgtttcaggactcctcttcctcccctaataacttcagtctttcctatatcataataaagctacattttcttctgaaaactggcaggttctcccttcctgacacaagcagccgaagggagggtggcaggaggaagaagggcagccaggggacaccggcctgcatgggggcgtccctggtccgagtcagtggccacagctgcagcctggctctgtgcccaaagttttgtctgggtgtcaggaaggccacgcactcacatttcatctctttccatgacttgctcgctgttcgttgacccttgttccttcttttttgagcaggaaggtgtcatcaaggactctgtccttggatgtgcacgaaagtcacctgaggcccttgacgtgcaggaattcttgccagccttggactgcaagccccaggctatggtacagcaatgtgcattttgtagcaagctctctgtgtgatcggagagtcacaaatggaaagaaataatataatcagtggagagaagatgtgcacagctattcaagtgcacagttctgtgacataccacaaggtgggggtggacctgtatgacgtcttctcctagcagcccccacatacttcccctgccctcagtgggccaggagtctcctgcttggcctcatctttgattctgaagcctccgagatctgaatacttgtgccccgtcctttttcagatgcctctgtggcaaacttttgttatttgactttctttgcatgaaaacaccgagaacaccagagaatgccccagggtttcagacttagtcctgtctcttcatattaaatagaaccattattgtgttcctctgggggaagcttcactctgcctgggtcccaagaccttccaaccagcaaagctccatttctccaggacaggcgcaggataactttgtgactgagacattcggtgcaatactgaacatcgtccactttcacacctccactctcagaactacaccttctggctgttggggagtcagcactgtatactggtttccagtagaaagcataacatttatcttgtaagacaaaccatcgcttcagcataactgagcgatcgtaagctcagttgcttccaggtggcggctgacatagtgagaacagttagttccctggtcaggggctactgctgcatgcccctcactgtgaatggggtaccttggtcagaagcaacgccgtgtggtctgctgtgatggcaacaggcagggctggcgagtctatgtccaggtaggggctccctgcagtgaaggccgatctcagccttctccacagtgtgggcagcctgcccacaggtggccaaccggtcctcgtgggaaacagtgccagcccagggatcgacaccaagtctctcatcggcagatggggcactcggcagtggtgtcggcctggtcagcctggtcagggcatgagcaggatgctgagactcttgtgtctcattcctgtctgatggccattttgtccgtgggtctatccggcaggcatggtggccagggaaaggagctgactccatcaacccggcgtgccgttttccccacctcaggatcaaaagcatcctctgcaaggattctctttggtgggaacatgggaatgtggatgaaactatcttcacagtcagagctgctgaggcaatgactgcagggcacctctgtcctctgggaagcccagctggaaggctcttggcagtggtgcctgctgtggctgagacaggggctaggctgtaggacgaggcttccgggagaggggtcgtgcggcaggcagggccgcgaagcctccgggtgccatgttggcatagtggactaggacactcagggcgctgttgggccaggctccggggtgcagactgcctgcactgcaacaatgaggccgggaagaggcagcagtgttcacagctattgacccccttgagccagccctctacatcctcatcactgcacgggctcagcgtctctggcctggcttgcccaggttctctgatgtgaatccttatagcatcagggctttcagtgccctggtcccctgcgtggtcacctggaggcctgcagtgcccctctcctcctcggactcaggttgaagccaggtccatctgggcttgggacttgggccctggaggaggggctctgacccacgggtggggtcacgggccccagggcatgctgctggttggctggggctgtgggaactccatgctcagccttccctccagaggccttgatgggaccaagtccccccattgaatgggatttctcaaggcccacaagccaaaaatataaaataaaaataaaatagcagtaaaaactaaggtccagcagccatctggggctgcaaggcagctgggcgggtgctgcctgggctccttccactccaagttcttctaccaaggggagtcacaggcggatgccaccttgctgctggggtgtctcttgacctgccacttctctgttataagcccgggcagggcctggtgtcggggtcccagtgggcttgctgggcagggtctgtcgttttgttccagggcggtccatggaagatgttgaagtgacagagtcccaggagccatgttcaaaagggcagcacaggaaacatggacccccgacatgcaggtctgtgtggagctgtggcatagagttcccggacaagtgtttccatgtaatacaaagcctgacctcaccgggggacaggctgacctcatcttgagcttctggggccctcaaagagtggcttgctgccctgggttctcaggaagcccccttgtgctgctgggcctcagcctcggccttcgggacagccctgtcaggccaggctgggggagaacaaggcttttgtcccagggggactgatggcatgagctcctggagctgagctggtggggtggggagggccagtctgtccccctcacagaggggcccaatgccaggggtcaccctcgaggactctcactgcatcttggctgaaaaaaagaaacatcttcaccgagcccatagggtcccttcagggcgggccccacagacctgggcctctggagtcctcggggtccctgtgtggccccctggcctgacactgaggatgcccgagaagccttgcaggctgctgatcccagggtgagggctgtgtgcagcttggggtgggggagctttcagggaacctcaggtcactcctagaatggccccctgggttcaggctggctcagggcttcctgcctcctgccctcacctcagggctgttcggcagccccaattcaggactcaggtggaagaaaccttcactgtcacccagcacctcgcatgggggcctgtctccacagcaggtgagaagtgaatgggcatgggttcccctctgtcctccaggccatccaccccatgccagggctgcagcaatcccacaccctgctgaactcttgcttctggctctgggtcagggctttccccgtcccctctgcccaaatcctctctgggtcagggacactgattctcttgtctccctggcttgttgtcttgacacccttggaggggcactcaagaatgaggggttcctgctgctctctgaggctacttgaaggtgggggtggaggcttccatagctgggtctgactgccccagtgtccctcagggcccttcaaggaggagagggggacaatgtggaaagtgggggaggggtgttgggggttcctgcccatgacccctgcctgtccacacagcatgtccagcacacacacacacgcgctcagcgcctgccctgaggagcggcagacccatttgactttcttagagtagaggaggaagaggaggaagaagaggtgcaggaggaaggccaggtaggagggctggtggggccagggcactccccaccattgactgccccaaagggtgactcggaaggggaccttatgctggagcccacctcggggtggcaggccccagtgtttccctgtgagttccttcatggaggtttgaaggttcctgaggacggtgttgtcctccaggacccgtctctgagagagttgctcctgaaactcccagacggtgctccaggaaagcttcatgaggtgccctagggacagggtggccatcaggcaagggggggttccctggtgggggagatctgtgcctgtaccccatttctaccaggcccacctcccactgggtggtgcctggtccttcttggccaccccggggtccagctgtgcacaggaggcaacagctggggaaggccaggcagagaaatgctcaccacactcctgactttcatctgggtcatgtggggagtggtctcagtgtcatcatgtcttgcccagcccaccaggccagaccccccatcaggacagagcagagagtcatagggacagtgtgaggatgcttccgcatctgaccaagtatacagtgtttgtatgtgattaaagttaagtggttatccactgaaaactgatgactatgaagtgtaagaacttttatgcaagcctcatggtaaccataaagaaaaactttcggccaggcgtggtggctcatgcctgtagtcccagcacgttgggaggccaaggcaggtggatcacgaggtcaggagttcaagaccagcctggccaagatggttaaaccctgtctctactaaaaatacaaaaattaactgggcgtggtggcgggcacctgtaatcccagctactcaggaggctgaggcagagaattgcttgaacccacaaggcagatgttgcagtgagccgagattgtaccactccacttcagcctgggtgacagagcgagactttgcctcaaaaaaaaaaaaaaaaaaaaaaaacctttcactagatacaaaaaagaaagagaaatcattctatatatatcactaaaaacaaaaaatcaaatcacaaaggaagatagaaagcaggaagtgagggaaaaaaattgctgaacagaacatcattaaccaagtggcaatagtaagtcttaagtataaataattactttgcatgcaaatagatcaaatgcatcaacagattgtccaaaaagatagaaaacgaaggtccaatgatatgctgtcaacaacactcaccttagacttagtagaaggaaataaataaaaagattagagcaaaaataaataaagcaaaaataaagttgtatactttaaatacacacaaggtttgtcaactatacctcaataaagctgtaaaaagaaaaagaaaaaatggtgcaaaattttattcgtgcaagaagaataagttctagatacctattatacaacataggtcctacagtaaattttacagtactttatacttaaaaaacttgcaactgggtgcggtggctcacgcctgtaatcccagcactttgggaggctgaggcaggcagatcatgaggtcaagagattgagatcatcctcgccaacatggtgaaaccccatctctactaaagatacaaaaaattagctgggcgtggtggcgcatgcctgtagtcccagctactcaggaggcagaggcaggagaatcatttgaaccgaggaggcggaggctgcagtgagccaagatcgcaccactgcactctaggctggtgacagagcaagactctgtctcaaaaaaaaaaacaaaaacaaacttgcctagagggtgtattttatgttgtgtttttatcacataaaataataataaataagagcaccagggaaaattttggagttattggatatgtttacagaatagactgtgttgatggttttacagatacatacttatctctaaaactatccaacttacatattaaatatttactgctttttgtaagtcaatccttccataaactcattttgtaaaaggcagataagtaacagaaggaaaaatagaaacaaagaacaggtgcatgaatagaacacggttaacaaatatggtttattattaatccaattatgccaataactaatcaatggtctaaattcatctcttaaaagacagatgcagagtgaatcaaagaacaaaatgcaactgtatggcatcttcaagaaacactctttaaatataaatacacatatagtttaaaagtcaaggtatacagaaagatacactatactaagactaataaaaataaaagcttgttttgagacagaggggactttagaacaagggaattcatcagggataaacaggaacatttgttaattttaaaagggtcaatttttcaatcacggatatcaatgtacacatatatgcctcaatgtatatgcccaatgacagagcatcaaaacacaaggcaaaaactgatagaactgcaaagagaactagatacatccagtattttagttgaagattttaataccttcgatcagtaataggcagacatggcagacagaaaaatcaggactatcctagttgaactcccccagcatggttaatcaactgaatataatagatgtctatagaatacttccacccagcaacagaataagggaaggtttaccaggatacaccacattctaggccataaaatatacattgaacaatgcaaaaaaattagaaatcacaaaacatatgttctatgttttcatacccagtggaatcaaactagaaatcagttaacagaaagatctggaaaatcccaagatacatggagatttgaaacatatgcttgtaagtaaagtatgggtcaaagaagacaacacaagataaattaaaattagaaatagtgtgagggtctctcataggggggcatattgtgatggtaagacagaaatcagtggcatccttgaaacggttgctgggaactgaactgcaccatcagcagagagggcatagtaggtccattggtggctgacctattagaggagatactgcgagtgaggtgcagctgcagacttgaggcagactcaccaatggtgagggaagagcagcgaatgagtcataaccagggtctgaccgtaaggtggcaggatgtcagcaaaggcatgactggtgagctaaaaggccggctactgggtggtgtctgaaatgaccctgtgataaaaactgtccatgacctgagtgccgagtaattggtgaataggcctgcagaagacacaattatgtgagggactttgggaaacctgggacagcaaaagccacggcacactgaggcttggaaaaatggttccatggggatgtaaaaggagttgaaaggtcggggtggtagtaggcttggagttgctgcattgtgagcaatggcaggctagaatgggacaggaccaagaggactcagaactaagcagtaaggtctaaacacactgtgtgtgctggaggtgatgtcataggcacaaaagcttgatcctggaggtggcccaatcaaccctaagttttggatcctttccatcctgaatggctgcgaagcacaactgagatgccaagtgtttctaggaggcacaggctgtagaaacagtgataagggtggcctaagagttaaactcaatggggcctgaggctgcctccataccttgagtctctacgtatggagctgcaacataacttagcatggaaagaaacctgaagcctaacttaagagtgtatttttgtaacaaatagctgagtcccaaccaacaaaagcagctgagattcagccaatcataggctgccaacatatcaaatcatgcctaataaatgcaaatgcaaagccataactggtctagctgtttgtggacctcacttatattttccgtctataaatgctccctcctgcacaagctttggagcagagcactgacctcttctggtcctgaaggctgcctgatttgtgaataattctctactcaattaaaatctgtgaaatttaatttgtctaaagttttaaatacatcagtaaaggtcttgctggataggaatgtagtcatggttggtgggtcagtgtgtggccatcctgggtgcacgacagggatggttacaatgagagagtcttccagcaggtggaaaaatcagtatgtgatctggaaaggcatgaactagtctccagggggtacaaggcatagaagcttcatgggcatgaggtagttcctggaagattggaaagatctgagtgggctcaaggactagatgagtgtcacgaaagcgctagcctgtaaagttgtcacagcaatagaggggtccaaagaaaagctaagaaaaaaaggtgaggaggtgtttatggaagctgatccagaagggaagcttgctatgtgttagaaaaaagcagacttcttacaagcgaaagtggcctgtgacacagaaggctgcctgtggtcaatcaggcagtgatattagtcagcagcattgtcacatagcaagatggcagagtccacgggataggagtcaattagcagtgaagtcccagcttccacttctcatgaggaaagatgcgagtgccagagagaaggtgtcatgaggccgatgttgcaactaattgttggaattctggcaatctagcagtggaggcactgcatggtgaaaaatcaaagtgagaaaagggggtcaaatctggagtgactcttgtaggcagcacagtcagaatcagtcagtgtaatgacaatgggaccctgagtcagcccagtccagaagcagcataagaagttgggtccccaggaagtgaactgggtccagtggatggcctctgcctgaggcaccattcaagagttcctagttggggctgtaagtggaagcacagctcacaggcttgctgacagtagtagtagtagcagtggtaggaacagaagtcagggcactccttccaacactggagatgctaatcaaatggcattttaacagtatgagcagggtcctgtcctcactatcaggtgtatttttggtacaaatgaccccgggggtgcttattggcactggaggggcagtttcaggtctgaggtttgtggcagacaacgtggagttagtagtaagcaggccatacagtagaggacatcaacagggaggctcccagtccagagcattgcatggcagtcatcctcaggaggtttgcccaggatatagagatgaggccctgaatgagaagcactaacataaagcaaaagcagcagtggcaataaccaggatggggtatgtctgtctgtaggccagaaatgtgattcagcccaagttaccttatcgctagaaacctaaagggggtgatgtgcttcccagggcatctgccaggacatttttctagtctgccagctgtcagctcactctcatgcagggttgattctgcagtcgggttccagaacccccagtgggacagcgaggtggtggtggctgccatgtctcaaagtgggatcaaatacagggtggttggtggcacacccatccctataacagtaactggacagggagaggtgaggagaccctgagatgccaatgcccatggtgggtggccctgaggtatggatagcatccctgagaagacaggtaagtggaaaacatgattcaaggattcctttcctagggccaggacaagggctgtggtagcatcaaagtccagttaacccacaatggggtggcaggttggcctaaagaaccatgcagaaagactgaaaggcgggtttgcctcctgggtgtggagatgagtagtggcagcagtgggcagctgttaatatgggccagcaccaggggcagacattagtgccaagaaggagtcaagtggccaatgtgtttacaaagaagggatgtttttccaacagcccacacattctctccattagcccactgcagtcttctggtatggaaggtgaaatgcccaggtgaatgccattccccagtgcccactgttgggtgacctcaattgtagaatgggtaccttggttggactgaatgacatgggggttccacagaggggtcaggactgaggtaggaagaagaccttctgggctgtcaacatcaacagaaaagcaaggagcaggctagagttagtgtcaacaatagtgagcatagctggtgaggcctgctccttgctggagtaggccaataaaatcgacttgccacttggcatgtgggtagtcacctctccaaatgtgactaagggagaaaaaagagtgatgtctcatcagcagagcagccagtcttggacggcccaagcaaatgagctggatgggacaaggaagccccatatgtaaatccaagttaacagtcaggcctagcttagatgtcccaaagtcaggtgtgcccaggaggtccagccggtccaagtaccacagtctcagctataagggtagagatgtgggtaaggcagtctgccttttggttatattgagaggcagcatcttggtgactgctgtgagctgacacatggtgaacaagtggcacaattattaagtatcagcaatgtacccccaaagggaagcaaccccaccccagtgcctgatcatggtcatccagtgtgatgccacccacagccatcagcaaaggccccagaattggtgaagatgtggatttcaggatggccttggatggtagaatcaggacaatggctgtagtttctgcccactgagctgaatgacccttcctctgcagctggaagggggtgtctgaagcagaaggacggctagtagctacccagatggcacctctgcatgccccatcagtgaagcaggcatacccctgctgcaacaatgtgatggccccccagctggtggaagggccccaactaaccaaaggctgagtggtagctgtttattggagatcttcctcaggcacactggaggagcagagactgaaatcctcatgaggcactgaaactcctaagcgttcgggcttggctcagttccgtgactaccatttctacttggcaagaaatggtcggtggtggtgcccagtttgcaaagatgaggatcccaaatccaaggcacaatggggatctatttttaacgtgatgggcttggatcctgtcagtgtccatctcagagagggctaggtaagctgcagccagctgtcccaagagagtcaaacacattaaacacaggatttatgccaaaagcccactggaagaagagaccttgattgggtaatctaaagcctctatgtgtcaaaaagcaatgttcttgaaacctaaagcctacatctgcaaatccttcctccagaggaccaatagaagagcctcctggactgcctgctggtcaacccttaaagcttcttctggagaagggcctgagtgaaggtggatgtctcataggtgacctgaaaaattgaacttactggaggtttggcatatgttttctccagaagccaaaaataccagcgatgccctgggtcttcttggtggagatgggaaaccctgagggtgacgagcctgaggctgactggttgtagattttgtctgccttccttactctaaatatagcctcacaatttggactcggtggggaaaggatgggagcagggtgagggataagagactactacacgttgggtacagtatagactcttcaggcgatgggtgcaccaaaatctcagaaatcaccactaaagaacttattcatgtaaccaaacaccacctgttccccaaaaacctactaaaatttttaaaaagtaacaatagcttaacgatgttgaaaagaatataagaatataatttgtctttcctgatataattacattttcaattttattaatttaagggagtatatttggcaattcagaaagatcaagggatgagtactctttagatttttaaaaggaaacatcaattagaatcattttgttttgccataaataatgtcatatgctatttagtatgctggaaatttttcttctattgtttgacaaaaataaaagatttattccaaaaactaattttctcaacatcaaaatttataatatgagtaaattataattttaaaattttcccttagaaattcatgcattcacaatgttgatctccagaacaaggattgaatacattagtcagacgtcagtttcttgatgttttgaataatatagtctggcaatttcttctgtttcttagccttctgtatataatacttggatattgtccttattattgaaatgcaaatttattgaaaggatactagcatgtccactgagatttatagtgtatcagttttggaaaaatcccatcccattatatgaaactgtactgaaataagagcaaaacatttgcaaaccatatagcttcaagtaattagtgacttgttcaggcctgccccttaaatttttgtttttggaagaaatcaatgagtacagactgttgaatttggatactccacatttaaacaatgccagtttaaattccattcttcttataaaactaacattttacatccaaaaaaataagtaaatatagccccacaatttgatggaaatggcaggctgttgtatcatgtgggacgatggctcatccccattgagttgtgtggttagttgtcaatatgagggcccattgaacctctccctctttgttatcgggcagaaggacattatccacatagtgccacaagtggacatcaggtggcagtcagagggtagctagatctagtcaatgcaaccttgagccagcagaggattgttgaggtagtccatcagatgcctcctaacggtgtactgtcagccttcaaatctgaaggtgaactgcacctgatcttcttcacaatagacacaatagaacatgtttgccaggtcagtaacaaaaccaagagggagaagcattctgaacttcttccaagacaatgacaatgctgggtaaggggactctaaaaggaagtacagccttgttgaggttgcggtttttagcaatgagccttcattcctttccctggccttgagaaagggccattggtgagttaaaaggtgagatggtgggtttcagaacacaagctctattaactgggcagatcccctctgtgccttccttgggtgatattatgaggtactgaccacctggaggagtctggggagctgtaaaggttctcagtaggcatgacctacttccgtggaaagaacttggtggggtgagaccttcagttagggaactgaagtgccagaacgtccaggccaatgataggaaatggtcactgagagacgggcaggagaaacactggtgctcatgggagaaggatgagtcctaccttaacagtgagcatggcaggcatcctaagggctcatcttcctctcagtccatcaacgggcacaggaaggctggtgcactgcatgggcaaagcagagataagaatgacccattatccagtgtgtaataagactatacacgtctacaggtttgaccaccagacttggatgtgataatctgattgacacaggaaaaaaagcatttggctaaatccatcatatgattaaaaccctaaccaaactagaaattgaagagtacttccacaatctggtcaagggcatctaagaaaacctacaataaacatcctaaactaagttagtgggtaaagaatgtttactccataagattgggaacaatacatgagtaatcactttgaccacttccatcaacattctactgaaggattttgctcaagaaataatgctaggaaaaaaatcagccaatggctcttcaaaacacttaacgtggaaaggacaccctattcactaagtggttctgggaatagtggctgaccatatgcataagaacgaaactggacccctctcactcacctgtacaaaaattaactcaagatggattaaaggcctaaatgtaagacctaaaactataaagatcctgggagaaaacctgggaaaactcttccagacacgggaatgctcatacattgttggtgggaatgtcaattagttcaacttctatggaaaaagtagggaggtatctcaaagaactaaaagtacaactacctttccacccagcaatcccactactgggtatctacccaaagggaaagaaatcattatataaaaaggcactgcactcccatgtttatcgcagcataacttacaatagcaaggtcatggaaccaaggtaagtatccaccaacggttcattaaataaagaaaatgtggtgcatatacaccacaaagtactaggcagtcataaaaaagaacaaaatcatgtcctttgcagtaacacagatgcagctgaaggtcattatcctacgtgaattaatgcagaaacagccaaatattgcatattctcgtgtatcaagtgggaacaatgggtacacatggacatgaagatggagagaatatactctggggactcaaaaagttggggggaagagttgaaaacgtacctactgggtacaacctccaatatttttgggtgatgggtatgctagaagttcaacccccccattgtgcatgtgatatacatataacaaacaagcacatgtaccttctgaatctaaaataaaatagaaaaagaaaaaagccaaagaaaaacatcccgggaatccagggagcagcggctactgcctccactgctcactgcagcccgcaggttccacgccggcagctcctgcctgcgggcagtggagctgcggagaatggcgggatgggtctaggtgccagggccagagcccaggaggggcgctgggtgggggcctggtcggcctctgccttgcaccggagcaggggtgcctggtgaaacaggcaacctgatgctctctgggccctgcccacgttccccttccatccaccctcctttgcatctttctgtgcctggggcccccatagaaagcggtcacatccagactcaccaggcctgagatgctggaggatggagaagcgcttgccacgggaaaattcctccaggaacacatgaacaaaacttcgcctgcacctgggacatccttctgtacggctggcctacgaggcaagtgttctgcacatgctccgtagctaactccaatgcagaggagcacatgagcccaacctccacggcaggtgcagatctttgcctcccttttataatgtctgtattcaaatgacatatcctggaagcctctttctgataggatgagagcagactctgtactacaacacagattggataagtctccaactctgattagttaagattatccagtcagagcaggagactattatccaataagagttgtcaaaaaaagttccttctcacccaatcagaaccaagcttccaagatacagcggttgagtacagccactgtaaaagggaggcgaaggcccattctgccattttctcttcgtggaggttgggctcgcgtgctgctctgcgctgtggtcgtcatggaccggaagcgtgtgcggcgcgcctgccttgaggccagcagcagggaagggtgttcccaggtgcagaggaagtgtccttcacgtgttcctggaggactttcggttagcaagcacttctccattctcccaacgtctcgggcctggtgagtctggatgtgagcgcatcccacggggcccaaggcacagagagagagagaggaacggggtggagggagggaagcgtgtgcaggggccaggagcgccagggttcgggcttctcggcccgccctcctgctgctggcgctgtcacctccctgtggtcctgccttctgggtccctgagggcctcccgtcatctggaactggaaataagttagtgaagccacggtttgtgaatatttattggcctttgcgtctttgtcttcattttcagtgctggtttttctgttgggttatttgtgttcttacgttgatttgaagaatttaaaaaggtattctataaattaatcctttatggggtcatttctagtgcagatagttgtttcttgttttagtctggtcgttgtaccttaattttatttcacatttctttcttgctaaaatcaataagaatctaattgattttatagattgattttgtatcgtgttacctggcttaattcacatattcatagccatcatttttggattgtggtgggtttttcatgtacttatgtacctgtagttatgtacttatgtatttaaatacttacgtacttaaatacttatgtacttagtgtcagccacatatagtaacagctatattgcttaaacgttggttcttacacctttatttttctttattttcttcttttattgtcccgatcacacctcctgaacacggtgtgtctggttctgattccagggaaaaggtttcagtgatcctgtattccttatgtagtttgctataatttcattttagacaaacttaatcagattaaggaagctgccttcttttacatacgctgagttatttatgactaattgttgaatttgaataaatgcttttttaacataaactgtaaatcatatgtttttctcctatttttctgaaaataggatattttacatgaactatttttggatgttaaccaatcctgcattttttagtatatcccacttggtaaccatgtgttacatttccatatgtggtttaattcatatgatttttttttttagaatatttgtatttctgttaatgaaagagagggcctatatttttttttctaatgtcgtcttcagattgtggtgtcaacgtaatgctggcttcacaaaacaaactgaaaaatatttcctgtatttcttctctttggaagagtctgagaaatttaggtgttttctgccttaaatatttggaatatttctttaggtatggaattttccatgtggaacagtatttttgttggctggtttgacttctaataattcaaatcctttggtatatgtaggagttttcttgttttatgttatttctgtgtccattttagtaagtttatttttatttttatttttatttcttgggggacagagtctcgctctgtctcccaggctagagtgcggtggcgcgatctcagctcactgcaacttccgcctcctggaatcaagcaattctccagcctcagcctcctgagtagctggaattacaggtgcgtgccaccacgcccggctaatttttgtgtttctagtagacagggggtttcactatgttggccaggctggtctcgaactcctgacctcgtgatccacctgcctcagcttcccaaagtgctgggattacaggtgtgagccacagtgcccagctgtatttttcagtagagacgggttttcagcatgttggccaggctggtctcgaactcctggcctcaggtgatccaccttcctcgacctcccaaagtgctgggattacaggcgtgagcccccatgtccggcctaggaagtttatttttcaatgtgatgttatttgaatttctgttgtcaaacttgtagtcctaagtatttcacagaaccctcctagtgtcttaatatactgctctgtagagcaggcttctcttttgattcccgatactggttttttgtgtcttttctctttgccttagttagtttcactagtggtttcttaagtgtattaatatttataaaccaacgtttttttttttttgagacggagtctcactctgtcacccatgctggaatgcagtggtgcaatctcggctcaccgcaagctccgcctcccaggttcaggccattctcctgcctcagcctcccgagtagctgggactacaggcgcccgcaaccctgcccggctaattttttgtattttttagtagagacggggtttcactgtgttagccaggatggtcttgatctcctgacctcgtgatccgcccacctcggcctctcaaagtgctgggattacaggcatgagctaccgcgcccgaccctgtaaaccaacttttatcctggatttgtttctgttgcatttttttcctatttcattgatgtctgctctttattactttaacgctgcattctttcattttgatcgtttttaattcttgagaagggagtttatgtgattgattgtcaatcttgttctctattctaacaatttcctttgaggcgtaaatttctctctaagcagggatttatctggcagcccacattttctgtcaggtgtttccaaaccctgtgtctgcagccgcgttgacctcccagtgtctccaccctgtatcgcctacagccatgtcaggccttgtgtgtctccatccttgtgcctgaagcctgtatcttctcaccagtatcaccatcccgtaatgactgaagcccacgtctgcccttgtgtattgtcacctggtctgtcctctgcctgcactttatgccccctgtcagaagtctccatttcttgctcctgcagcccgtgccagctgtgtgagtctccatcctgtgtgcttgcagcacattgcttgccttgaatgttgccatctccttagccttcaggcagtagcagtcctccagtgcctcaatccctgtgtttgcagcccattctgatgtttttgtctgtcggtcccctgagcttctgcccatgccagcttatgtttgctacattctctgtccccctaatccatgtccacagtcagtgttttcatccatgctttttgggccatgtctgcacttgtgtgtctccttcccctgtgccttcagcccatttctgtcctttttctggatcatttctcccaggagactatgcccaaaactcctatccccagtgtttgtacctgcagccagtctctttcgtggagtacctccgtctgttgttactgcagcagaggcctgtcattgagtgtgcctgcttcccatgcctgtcttcctgtgtctccagcccttgtccatgcagtccacattaggactcttgtgactccacccttcagcctacagccacatctaccttcgggtgtctttatctctgtgccccctgcccacgccaaccttcacctactcctctgtcctgcacctgtacctatgtctgtccctggtgtgcctctctgccatgcagctgtagccagtgagctccctttttgtctggatcccctgtgactgtagcccaggtcttctctcctgtgactgcagcccatgtctgcccttgaatgtccccatcctctgtgcttgtcacccgtcggccaggcctagcatgtttccactctgtgcctacacccatgtctgcctgcagggtctccattcatggtgccatagtttggttcccggtccctatcctcctggggtggattctggcattgtgttgggagggagaaggtgacccatgaaagggaagcctggaacgacgtaatgggcaaggaggctgccattcagcaggctgcacagtggcagagaagacatggacagtcagaatcctccctgcatcggggcactcacgtggggctgtgcctgatgtggggagtaaggggaagctggagcaggaggtctggagccacctggccctcttgggcctgagacctccccactgcaggggctccatcacttccctggtggtcctgcctcctgggatcctgccctgcagtgtttctgcagggatcctgtcacctggaacttgcagtggcgggttttgtgtgaggtagagtttagcaaacgtttatcggcttctatgccttacttttcttcatatgctttgttcattttgtgcgtgtttttgtagggtcctttttttaatattgatttgaaggatttatcttaaatctgcaaattgatcctttattggctcatttttgtcatagatacttgttctctagtttgatcattattttctactggtttcatactagtatatagtaatctggttgataacaataatgtatccagtaagttattaattgtaacagttttggggttttcagggattgtctaggcatgtaatagtgtcatatacacatatgacaaattttttggtttaaaaattaatcctaatacctttctgtttcttactgtattgtttctccactacaatgctgattaaagagtgatagcaggcatctttatcttgtcctgcactggtggaaaaagcttcccataattctctgttaattatgttatatgttattggctagtattagactttatcagatttcatcaaattaaggaagttgcttttttttttttttctttgagatggaatctcgctcttgtcgcccaggctggagtacaatggctcgatcttagctcactgcaacttccacctcccaggttcaagctattctcctgcctcagcttcccgagtagctgggattacaggcacccaccaccatgcctggctaatttttgtatttttagtagagacggggactcaccatgttggccaggctggtcttgaattcgtgacctcaggtgatccccctgcctctcctcccaaaatgctgggattacaggcatgagccaccatgcccggctggaagttgccttcttttttttattatttttaatttttttgagacagagttttgctcttgttacccaggctggagtgcaatggcacaacctcggctcaccgcaacctctgcctcccgggttcaagcagttctcctgcctcagcctcccgagtagctgggattacaggcatgtgccacaacgcctagctaattttgtatttttagtagagacccggtttctccatgttggtcaggctggtctctaactcccaacctcagatgatctgcccgcctcggcctcccaaagtgctgggattacaggtgtgagccactgtgcctggcccatcctctttttatgttttactcaagtttttttgtgtgtgtttgtggctcagttttaaattttattaaatgctttaaaaaacttttcagctgaatgatcttactattttctcctgtatttttctgctaatgggatgacttacatgatttattttgaatggtaaggaccttgcattttggtgtatattccatttagtattgatctagtatgttttcataggtggcttcattcatataatattttgcttagaatatttgtagctctgtttatttatttatttatttatttttatttttttttttgagatggactcttgctctgttgcccaggctggagtgcagtggtgagatcttggctcactgcaagctccgcctcccgggttcacgccattctcctgcctcagcctcccaagtagctgggactacaggcggccaccaccatgcccgggtaattttttttttttgtatttttagtagagatgaggtttcacgtgttagccaatatgatctcgatctcctgaccttgtgatccacccacttcagcctcccaaagtgttgggattacaggcgtgagccaccgcgcccggccccagctctgtttattaaaaaggagatacacactgtttatgaaagaggtgacataattttattcatttgtgttccataatgtgtcctggtccaattgtgtcctcaatgtaatgccagctacacaaaaaattttttaaatattatctttattttcattttagtgtttttctttgtatggactattccataattatgagctgggagttttacttctggaacatttttgtttgttggtttgatttttttttccaagaatttattcaatttgtttagtagactaggagtttttctatttcatgttatgtttgggtcagtttgggtaagttggtttttaaatgtggtgcattttgttctctgttgaatttttagaccctcatatttcacaaagtcctcttaagttcttgttaaggtccacaggctcagtgaagaatgtgtctgtgttgatttctgatattgatggtttgtgttaacttctctttttcctaatcacattgactaatggtttattgatgttatttgttgatttgtttttgttgtgctttattttttatttattgatgtctgctgttatgttttttattgcctttattcggtatacttccagtttgattgttccttagctttgatccctgagaagggagctgagatgattgattttcagtctgtcttttctgacatcctcacttagggtgtatgtttccactaagctctgatctaagcatctcctgtatgcactcagctgtttccaacccctgtgcctgcagcactgtctgtctcccaatgtcttcatccctgtgtccctgcacacatgccatgctttgtgcatctccatcccagtgcctgatctgcaggttctctccatgtctgcccttgtgtgttgtcaggttttgccgtcctctcagcctgcagtacagatcttgcctagattgtctccttcccctgcgcctgcctcccatgccagtcttcatttgtctttggtccctctgcatgtagcccatgtcttccctcatttgtatccattccttgtccatgtggcccatgtcaggatacctgggtcttcactcatcacctagaggtccatatccatcctcaagtgtcttcattccccagctgccctgtgcctgcaggcatatctgtcctcaagtgctgccataccatgtgcctgtggtcagtgtcttccttttgtatctgaaatccttgtggctgcagtgctgccttctcatgtgtctgtccccatttcctctgctgcaccctaaaggtctcatgtgtctccatcacctgttcctgccttgggttacaagtgacacagtttggttgtgtgttcactgaaggatgatttgattccttccaggttttcgtcattgtgaataaagctgctgtgtgtattttcttattggtttgtgtgtggatgtgttttcacaccagttgggtagatgtgtaggggcacggttgctgcacactatgtgatgctgcagtttcctttgcaataacatgccgtgctatcttgtgaagtggctatgccattatgcagtctccccagtaatgaaggagagttcctgttctgtatcctcgccaaggattggtagtgctggcttttgcttgtttgttgtttatagaactgtcctaatcgatgtataggctgtctatctcattgctgtttgaatttgctttccgtagcgtacagtgcattacttttttctcctaattccctagtgttcaccatgtctttatatgctgattttccatcagaatatttactattgggaggtattgctacatatatttgtccatttgttaaatgtagtttattttcttactttcgaattttgcaagttcttggtatattttgcatgcaagttcttcttcagataggtgttttgtaaatactttctttaaagataagtctggcaaggatcccctctctccctactcctatttaacatagcattggaagtactggccagggcaatcaggcaaaacaaagaaataaagggtattcaaatagcaagagaggaagtcagattgtctctgtttgcagatgacatgattctgtatttagaaaaccccatcatctcagccccaaaactccctaagctgataagcaacttcagcaaagtctcaggatacaaaatcaatgtgtagcaatcacaggcattcctgtacaccagtaatagacaagcggacagccaaatcatgaatggactcccattcacaattgctacaaagagaataaaatacccaggaatacaacttacaagggacttgaaggacctcctcaacgagaactacaaaccactgctcgaggaaataagagaagacacaagcaaatggaaaaacattccatcctcatagataggaagaatcaatatcgtgaaactggtcatacttaggtcataaattcaaagtaatttatggattcagtgctatgcccatcaaactaccattgccattcttcacggtattagaaaaaaactactttaaatttcatatggaaccaaaaaagagcctgtatagccaagacagtcctaagcaaaaacaacaaagccagaggcatcatgctacctgacttcaaactatactacgaggctacagtagccaaaacagcatgatactggtaccaaaacagaggtatagacgaatggaacagaacagagacctcagaaataacaagacacatctacaaccatctgatcttcaacaaacttggcaaaaacaagcaatggggaaaggattccctctgtaataaatggtgctgggaaaactggctagccatatgcagaaaactgaaactggaccccttccttacaccttataaaaaaattaactcaagatggattaaagatttaaatgtaaaaccccaaaccacaaaaaccctagaagaaaacctaggcaataccattcaggacataggcatgggcaaagacttcatgactaaaacaccaaaagcaatttccacaaaagccaaaattgacaaatgggatccaattaaactaaagagcttctgcacggcaaaagaaactaccatcagagtgaacaggcaacctacagaatgggagaaaatttttgcagtccattcatctgacaaaggtctaatttccagactctacaaggaacttaaacaaatttacaagacaaaacaatgccgtcaaaaagtgggcagaggatatgaacagacacttctcaaaagaagacatttatgtggtcaaaaaatatatgagaaaaagctcaacatcactgatcattagagaaatgcacatcagaaccacagtgagataccatctcacaccagtcagaatgacaattattaaaaagtcaagaaacaatagatgctgatgagcctgtggagaaataggaacgcttttacactgttggtgggagtgtaaattagttcaaccattgtggaagacagtgtggtgattcctcaaggttctagaaccagaaacaccatttgacccagcaatctcattactgggtatatacccaaaggaatgtaaatcattctactataaagacacatgtacacatatgtttattacagcactatttacaacagcaaagacatagaactaacccaaatgcccatcaatgatagactggataaagaaaatgtggtacatatacaccatggaatactatgcagccataaaaaaggatgagttcatgtcctttgcagggacatggatgaagctagaaaccatcatccttgtttggggggtgagatttattggctctgtaagcagaacatgaacttttgcccatttataaaatcagattgtcagctggaagcagtggttcatacctataatcccagcattttgggaagccgaggtgggcggatagcctgaggtcaggagttcgagaccaggctggccaacatgatgaacccctgtctctactaaaaatacaaaaattagccaggtgtggtggtgggcgcctgtgatcccacctacttgggaggctgaggcaggagaatcgcttgaacctgggaggtggaggttgcagtgagccgagattgtgccactgcactccagcctgggcaacagagagagactctgtctcacaaaaaaaaaaaaaaaaaaaaaaaaaaaaaaaaaaaaaaaatcagatcgtcattatcttccttattgcttttaagagttctttatgtattcttgatataagtcccttgtcattaattgtgtggcaaataccttcatccagtgtgccttaaatgttcttcttttgatgaacaaagttcttaagtctaattcatcaatcttttctctaacggttaatgctttttgtattctgtgtaagacattgtttattccaagatcatgaagatactgtcgtatgttttcctgcagaagctttattgttgtatctttcacactaaatagaaaccctctttaaaatcaccaactcctactgcattcttaaaatattttgctaaacttttcgaagattctggcaccacaacactcgcttcccagcctcaaaccttttggggaggtggggacagagaaagaaagaagctggcagggaaaacccagcctcagccaagacctagcccagatagtaaattagcagggctgggagtctccatcatatcagcagtcacatgtcttaaaaccagaatctaccaagattatatatatatcttgtatctgccactgccattaccttcttttcattttatgtcaaaaaaagaaaaagaatcccagcactgaggcaggaggattgcttgagcccaggagtttaagtctgcagtgagctgtgatagcaccactccactccagcctgggtgacagagggagaccctgtctgaaaagaagaaaagaaaagaaaacctgtcgtgttactgaccagtaataggggctcccaaagtataaactcacctcagacccctgtttgttcttcctgctacctgtccattctgcctccgccccgttccgaggctggaccataccatgaaggaaggccccttggttacagcctccccagcccgtcagccatgctgccaagaatactggaaagaataaaaagctagagggaggcggctgcctgcaggaggtttagcataaaggaaataggaatggtaacaggaaattgaagaaaacagttaaaaagagcattcattcaagaatgaccccactgatgccacctgtgctgtcccccacctgacagaaatggaccgaggcagctgccagagtggatatgcaaaggcaattcacgtgttcattagtgcccttttatgatgtaacctagtcataatgagattgcggggaagagatagaaaataagatgtttccaatcttgatcataagaatagtatttcctgctggcgtgattgtgtgtgtgtgtgtgtgtgtgtgtgtgtgtgtgtgtgtgaatattttggattagctttcaaaatattttacatttgatgaaacccaaaactcattttgcctggagtaatttttattcattgttaaatctctgtaaaattagaaatataaatatgtgtctggtttatttactcttcacaaaatatggtgtctagacctgtttgtttatgatgcctcttaggctcgttctctctgagttaggaagccaaaaaaaagtggtgaaagtcagatggttcatagtctttttgaaaaccagtagccatgtgcattttacttaaaatgactttctttttacctcaccaaagtacagcatgataggttatgttcaatccctgtcgctctccgtgtgtgtgtacatatgtatgtatttttagattgagggggtacatgtgcaggtttgttagactgcgatattgtgtgatgctgaggtttggggtacagttgatcccatcactcaagtagtgagcatagtatacgatggttagcgtttcaggccttgtccccgaccctgcctcacccctttcagagtccccagtgtctgttgttcccgtcttgtgtctctgtgtctctatgtttagctcccatttataagtgagaacatacagtattgggttttttgttcctgccttagtttgcttaagataatggtctccagctgcatctgtcttgctgccaaggacatggtttccttctttttttatggctgtgtagtatttcatcatgtatatgtaccgtattttctttatccagtctatcattgatgggtatttaggttcattccatgtctttgctattgtgactagtattggaatgaacatatggagtgcacatgtctttttggtacaattatttgttttcttttgggtacatatccaatgagattgctgggtcaaatggtagctctgtttgaagatctttgggaaatctccaaactgctttctacactggctaaactaatttacatttccaccaacagtgtataagtgctcccttttctctacagtctcatcagcatctgttatttgtttgactttttagtagccattctgactaatgtgagaaggcatctgattgtggttttgatgtgcatttctctggtgatgagtgatgatcagcattttttcatacgtttgttggccacttgtatgtcttcttttgaaaaatgtctattcatgtcctttgcccattttttaatggggttatttgttttttgcttgttgatttaagtttttgctatagattctggatattagatacatcgtttgtgaatatttctcccattctgtaagttgtctatttactctgttgatagttttctttgctgtgcagaagctctttagtttaattagattccacctcttttggttgttattgcaattgcttttggggacttaaccaaaaattctttgccaaggccaatgtcgagaagggtatttcctaggttttcttctataattttaatagtttgaggtcttgcatttttattttttattttttattttttttgagatggagtctcactctgtcccccaagctggagtgcagtggcgcgatctcagctcactgcaagctccggctcctgggttcacgccattctcttgcctcagcctcctgagtagctgggactacaggcgcccgccaccatgcctggctaattttttttgtttttagtagagacggggtttcactatgttagccaggatggtttcaatctcctgacctcgtgatctgctcgcttcggcctcccaaaggtcttacgtttaaatctttaatccatcttcagttagtttttttatgtggtgaaaggtaggtgtctagtttcattcttgtgcatatggctaaccagttatctcagtatcaatttctgaataggaagtcctttccccattgcttgtttttgttgaagatcagataactgtaggtatgcagctttatctcagttctctattctattccaaagatctatgtgtctgggttttatactagcaacatgctgttgtggtttctgtagagttatagtatagtttgaattccagtagtatgatgcctccagcttttttgttcttgcttaggactgctttggctattcagggtcctttttagttccatatgaatttcaaaatagttttttctaaatctgtgaagagtagtttgatgggaatagcattgaatctgtaaagtgctttgggcaatatggccactttaatgatattgatgcttccgattcatgatcatggaatatttttccacttatttgtgtcatctctggtttctttcagcctccttccatatattaatccaataatgaacttgtgttcagggacctgttcagctccagttaatattgtaggtgctggggtttccacagtgaatgaaacaggcaacagtccctgctctcatggaacttacattgtcattgggtctggcagttaactgaaatagaaggtaacatatgtaccatatttgaaggggatattactgtggagagaaataaagcagggaaggaggattgggaatgttgggtgaatggtgcagtatatatacagtagtcagggaggtgacattcgagcacttgcacctcttccctgaagggctttggtgtctgcatgaaggtttatttcccaccaaggactaggtgtggaaggtcaaagtaaggaggtcatcactgccgtgactgtgccaataggagctgaagtgacacaatggtggtcgcctcaggtcagcagcactgggaagtgagcatcgcagccagacccacctgcagagccctgggccagctgcctgacatcttgagtggcccagaattgagacccagtaaaagcacatgagtctgctctcactatcaagtgaggcccacactgagctcaaaatggtgctcctaggagacccttccacacattctgctcaactcagacatcctggggtctttttggaataagtcactcccaagaaggccctgcaaattactctcagtcctcaaatttcatgctcctgatgcgtgttagctcttttccaagccaagggcagccctgacccatggaacccctatacctccttttctttcatctaagagtctactctgagctcctggttttgtgttacgatggggaaatctccatctctaatgtactttccagtaagaattctggagggacaggaagccaagagggtgaatgtgacagatagaattctaaggataatctccatgactctccccagaataatgtccttccctttatatgacacagggaggtggtctggatgtgccccacctgatcacagagccctgtaaaagccaagaggtgtaaagcatgagaaggactctgaatgttcttggtggcttgaagagggaggggcacatgagaaggagctgagaagggcccgggcccctggctgacagtcaccaatgctttagtgctagaaagtccctagccatgaccagaaattgtcatgtgggtgctctgcagttctgaggttgacacctgcaaatgtggtgccaccaggtcctttgtctccgtctctgtcctgatgccctcagacctcagccaggccaaggatgctgtttgctttgcctctgccttccttcagccgggggatcttggcctggaagtcactctgatgaatgtgtggaattcagctctaagtctctcctgcatcctctgtcacctcccaagaagcatgatgaggcacagccaccccacaccttcatgggtggcaccttggctgtggtccttgggtcctgccatgccatggacccttggacactggtgaatcaggcaagggcatgggtagagagtccctgcatctcacctggatctcaaaagctggaatccgtaacccttagcaagttgtgatgggacgagtttaagagttttaaaggctgctgttttcatgtttgaaactacaatattagagcagtattgtagtattagagtcagcagctctgtgaggtggtgagaaccccagccctggaggtgtgcaaccaggaggggaggtggggcacaacaagagcatcctgtagtgactgtaggcttgcttgtttctacagacagaaagttcctagcagtgggatttgtttgttacctctttcttagaaatccacctgccagagcccagctgttgttttgctactgttcattgacacaagcaatgaaatttaaaagttacaaatagcactaaaggcccctttgacggtcacccccagttctgtcccacccagtggtagccagtgtcatcatgcatgtccttgcaggcttcttatgcttcacagtcacgtgtgcatgatcacgaacgacacagcactgtagtgtatgtgtgtgcgagtgtgtgtgtgagtgtgtgtgtgtatgtgtgatgtttggtttatcatactgaggcaggagaatagggtctggaggcagagaacttaaagccaactcatgctgaattcctaaaggtgaatcaagggaaaccaccaaggtctgggggcagggaacctggggtcaattcatgctgactccctaaagagagaacagctggatctgggggcaaggaacctaaggccaattaatgcgaccttcctaaagctaccacccccccacacaaaccattctccccacacccaagtggcaaaggatcaaaggctcctctcctatagccctccccttccaccacgtctcagatggaaagggagagtgccctggattggccagggccaagcacgagccatcccttcctcagcatagggcaccagtttgccccagcctttagttagccacgaccaaatccttcatccaggtaagggttagcctatagggtcctcaaaaggagtacttaaaacccagaaaactttgtaaccaggcccttgagcccattgctcgggcccactcccaccctgtggagtgctttctggctttaataaatccctgctttcctgcttccttcctgtgtttaatttctttgttactttgtgtgtttcgttcaattctttgttcaaaacggcaaggacctggacaactcacgctcccttccttccagtaacagtactgtaagactcacgctataaactacttttattcactcaatatctgtcccgagagcttccacatctgtctcacgctcttaattgtagcatagattcctggctctgccccgtgcaccctgcttattcaggcatcctctgctgcatgaacatttacattgtttcctgtttctcgctgtcatcaggaggctcatggaggaggagaatttctggggggtgggttaggtgtgtgttgtacatttaactgaccctggctggttactctccagaacgctgctgccagctccctccctccagtgggccctgagttcatgcttctgtagatcacccccctgcccttgatgttaccaactttaaaactttgcaacctgatggctgaaagttagttttccattgttcagttgtgtttttctgatttttgggagactggacatttcctgtgtttgctgaccatctgcttctcctctcctgctctgtgcaccatcaccctgctccagctgcttcctggagcctccctccttcctctccacctgctcacatcctcctcgtccttcagtttcttcccaagggcccatggactttctttggcttttacgttcctctcactccgcctttggctgttgctgggcttcccatcccctgggaagtttcagaggatcgggaagacacaggagtgcagtcgccatgcggtgcaatacgggccatagtattcatcctccacggcctttattgaggacttactgtgtaccaagaacctgctctaagaacgtaactgtgctccctcacttcatgctcataaccacctgtgagatgggcaatgttctcatccccttttatgcagagggacagagaggagtagaggcacagaggagttccataaattgtcaccaaggccttccactggtgtgcggcagggtcaagattgaaacccaggctgtccaggcctagggttcagcctttccagtgctctgctaggtgttggacagggccaacgagacacagagaaagagcatcacctgacttgggctgggtcagagatggcttcctggaggaggtgacagctcaacagagccttgaaggaggatcaggaggagctgactaggcaatgaatagaataagtatgtccaggaaaagggaagggccttctcagtgatgctgggaggctggagagctgtcctggcccaggatgtgtgcccggggggcaggagatcaggcccaaggggtggccagggccggatctagaagacttgggccatcccacagtcgatacctgatcccaaggccaggcaggccttccactgctctgtgcgcactggtgggcagtgcccccatgggaccccaggagcctggaccccagccactcacctgggctcctgagacccaaggcgcaggcacgggggtgggagggggtgcggctaatttacatcttaacaggtcaaggggaaaactgcacgtctcactgtgcagatggaacccaccgctggatggacctaggacacagcctggattcacagcctttccctgctgctgtgtccccacaccccaggcagggagcgaatctgttctctgatcttcttttgtgtccagttaaccatgtccccagatacggacctgatcaggagctcaagtacataaactttctgagaattgaacaaagcggtgaccaaaggctgcctcgacacaggatgatgttgcttagagccctgggaccacgagtcaggaccagccggaattgtgacctggtgctggcagaggctgtctggtgctgcagaatcagccctggccagttgttccctgacgcacactgggactttggctgagacacttcccgtcagctgtaaaacaaagaagactgtctttcctattagatatgcctcaaaaacacaaaagtgctttgaacctgccagacttcctcttgaagagtcacaagcacacaagagaaggctctgagaaagaaggcctgcagtttaaaaaaaaatactttggctttcttttttttttttttttttttttttgagacggagttttgttcttgttgcccaggctggagtgcagtgggcgatcttggttcactgcaacctccacctctcgggttcaagtgattctcgtgcctcagcctcccaagtagctgggattacagacatgcgccaccacgcctggctaattttgtgtttttagtagagatggggtttcaccatgttggtcaggctggtctcgaactcctgacctcaggtgatccgcctgccttagcatcccaaagtgctcggattacaggcgtgagccaccacacctggccgctttgactttgtttaacccagcatttttcaagctaatttgaccacagagatctagcagcatctgttaaccggacaagcacatgaggcacaagcagagggctctaagaatcaccctccttggctgctgtctggtctcagggtgcaggggagagtctctcctgcatccaagtctgcgctgcccagagtgtgagcccagcccacagagctagtgcctgagaggagtttttcctttctttttctgtcaacggagcttctctctcaagcttctactccgcctggctgtgtcagtcttagggttttcctgtttctctttggggcttcatgggggttctgagattttatgtgggttgagatggtggtagaagaggaagggcatggacagctcctctggtcagttgggcaactgccatctggtcaatagggcactgtctcccctcaggtccagtggctttggtggcttccaggccatgaatgggtcctggaaactccccaaagctgcccttgtccaatagaacccgctaccggccttccactcagccactgcttcacactatggcagggtgtgcggtagctccctccctctccactccccagcccaaactaggggagaatcaggggtctgtctttaattttttttgtatcctttgatttcagacttgcttttgaatagatagtattagtcaggtggcttgaaacccagaaagtattgaaagatatgatagaaagtctttttttccttctttttctccagctgcccagttcttgcctccccttgagtaaatagttttatcgaaatattattcccgtgccataaagttcacctgtttaaagtgtacgggtctatgttttttagtattaatgtatttacagagttatgcaactgtcaccataatctaattttagaacattttgatcaccctaaaaggaaactttgtcagtcttcattcctccctagccacaggctactactaatctattctctgtctttatagatttacctgttttggacatttcacatgaatggaatcacacagtacatggtgtattgtgactagtttcttcaacttggcataatgtttccaaaggtcatctgtgttatagcatgtatcagtagttcatttttatggccaaataatattccattttatggatatatcatatgtggtttatccattcatcagtcggtggacatttgggttgtttctgcattttggccattattattaataatggttccatgaaggccaggtgcagtggctcacacctgtaatcccagcactttgggagactgaggcaggcaagtcacttgaggccaggagttcaagaccagcctggccaacatgcaaaaccctttctctactaaacacacaaaaattagctgggtgtggtgacacatgcctgcattacaggcatgcaccaccacgcctgactgatttttgtatttttgtagagacagggttcaccatgttgccctggctggtctcaaactcctgggctccagctgtccactttccttggcctcccaaagtgctgggattacaggcgtgaaccaccattgccagctgataaaccacatttatgaaaaacccacagccaacctcatattcactggtgaaagactgaaaacatttcacctaacataggaggaacaggtcagaacgcccccttttaccacttatgtttaacatagtattggaattctagccagataaattaggcaagcaaaataaataaaaagcatcatgttggaagggaagaaataaaactatttattcacagatgaaattaccttacataaagacagttcttaaaatccagtagaaagctactagcactaataaaggaattcagcaaagttgcagagtacaaggtcaacacgcagaaatcagttttatttctatacactagcaatgaaaattaaaacaaacccacctacaatagaaaccgaaaggataaaattcttcagaataaatttaaggtgagagacttgtgcacaaaaactatgaaacattgctgaacagaattaaaggcctatatgcctgtaaatacagctcaggtttatggattggaagacctaatattgttaaaatgctatataccacccaaagcaaaatacagactcaatgcaatctctatcaaaatctcaatggccttttttgtagaaatagaaaagctgatccccaaattggtgtggaattccaagggatcccaaagaaacaaaacaatcttgaaaaagagggacaaaaaagctgggcataatggttcatgcctgtaataccaggactttgggaggctgagattggaggattacttgaggccaggagtctgagaccagaagagcaacataacgagactggtttctacaaaaaactaaattaaaaaaaaaaaatagccaggtgtgtgtcatgtgcctgtagtcccaactaattgggaggcggagatgggaggatggtttgaccccaggactttgaggctgtagtgagctatgattgcaccactgcactccagtcttggtgagactgagaccctgtctcaaaaattaaaaaatgagtaaagtaagaaaaaagaagaaaaaggaggacaaagttgaaagactcacacttcctggtttcaaaacttattacaagctacagtaatgaaaagagtgtggtcatggcataaggagagagatggaaatcaatggaacagattgagagtccagaaataaaccctcacatataaggttcgttgatttttgacaaaagtgccaagatcattcaatggggaagagccaggctcttgaaaaatggtaccgaggccaggcagacctgtagtcccagcactttgggaggccaaggcgggtggatcgcctgaggtcagaagctcaagaccagcctagccaacatggtgaaaccctgtctttattaaaaatacaaaaaagcagctgggcatggtggcgggcccctgtaatcccagctactctggaggctgaggcaggagaatcactggaacccaggaggtggaggttgcagtgagccaagattgtgccattgcactccagcctgggcaacaagagtgaaactccatctcaaaataaataaataaaaataaaatggtaattttgatgtgaattttacctcaaaaatattttttaagagctgcatagggagactttgtctgtagaaaaaaatcaaaaacttagccagacatggtggcctgcgcctgtggtcccagctactcgggaggctgaggtgagaggattacttcagctgaggaggtagaggctgcagtgagcaaagatcatgccactgcactccaaccttggtgacagaacaagatcctgtctccaaaaaaaaaaatcagagctgcccttgcccttgtgctaatgggcgctccctctattacatcacctacctggctcccagggccacctgagtttgagacccctgctctagattcatgttaccaaatccccttccggagaacgtgtagtcagtgacaccaccactcaggatccaggagagaaacattttcaccaaaccctgctcaacacattgacttcctcatttcagtgggtaggagagtgaggttcagagatgttaagtgacttgctccaggtcacacagccagtcaggacagcgtcaggactggaacccagttcatctcatcctgaatccagtgacctgtccttgtgtcccacaggtttcctacagccggggaagccaaagcatagggctgggagccccattcgagggctctgacgctcagaaactcatcacagcccgctctgaggccctcagctggcacagttcccagccaggtgagagaagaggaggagttcaggcccctgagtctgggagcagttgccggtggccggcttcctccagcattggtggagggggagccaccagggggcatctgcgtgcataagagtcttggtcttggctgcccagttagtcatggggctgcccaagtatctgctcctccccaagtatctgctcctcttttgccaggagtggaaggagcagctcaaaaccaggctgtggcaggtgccacaggagatgggcttccctgagattagcacctccctttccaccaggagccgagaatactcaggttgctcatttgaacccatatggtgaagtttccctctctctctctggatatttattctgtagtttcggttttcaaaaacaaaacccttctgtagcatggagttctcagactgggtgctgtctccagtgtgttccttgtgaaacaaatggattttgcttgtggttgtgcgaagtctcataattaccccagggaggagtggtccagttgtgaaaggggatggagtagcacatcagctttgtgttggggctgtcctgtgcgtcctaggatggttggcagcatccctggactctactcattagatgccagtagatcacctccctatcccccccattgtcattgagacaaccccagtgtccccaggcacggctacctgtctcttgatggtgagggcagaagcatcttggttgagcgctgctggtgtagagacagcctggatgagaagaggagagagatgagaggctaaagcctctttgaggtgaaggtgcagactctggagcccagcacgtgtcgtcagctgggcctcagtgtttccctggacagtgttgcccttgggtttccagccgtaaacagcaggaataaatcccacgagaggctcatgcctcattctccgtttgcttcttttttccttttctttcctttcctttttccttttcctttcctctttgtttttttgagaccgggtcttgctctgtcacccggactgcagtgcagtggtgcagttgtagctcagtgcagtggtgcagttgtagctcactgcagccttgacttcctgggctcgaggaatcctcccaccccagcctcctgagtagttgggaccacaggcacgcaccaccatgcccagctgattgtattgttttggggttttttttttagtatgttttgtagagatggggtctcgctgtgttgcccaggttggtcttgaactcctggcctcaaataatcctcccaccttggcctcccaaaatgctgggatacaggcatgagccaccatgcctggcctaaatttctagttttgacagatgtgccagggttatgcagaatgtcattctttttttttttttttgagacggagtctcgctctgttgtccaagctggagtgcagtggcgtgatctcagctcactgcaagctccgcctgccaggttcctgccattctgctgcctcaacctcctgagtagctgggactacaggcgcccgccaccccgcccggctaattttttgtatttttagtagagacggggtttgcaaaatgtcattcttaaggagagttggatggaaagcacaggcgaactctatcgtatctgtttaatttttctgtaaatttaaagtcattcaaagagtaaaagtaaaagttcattttaaaaaactgaggaggttatcattccctctgtgtaaaaagcacaggaggctggcctacagagtcaggccgtggttgcaggggcagtgctgggagggcctgggcatgttctgcttcatgatctgggggctggcgagttccatctgtaagtctttggagctgtgcactcacagcagatgtaagtcttcatcttacatctgtaagatgtaagttatatcataataactttttgaaagtttaattcatataacaaggtcaggaaatgtccatttgggctgtggcacctcagatgcttatccagccatgagccttggcccgtacgcttctagaagcatccactcccacatagcattttccagacccagggcacctggggaacaaggagcaggattggggagatttgaagtttcaagtggggaggtcaagaagagtcaatgagaaggggccaattgagcaaggagctgcagaaggcgtggagggccctgagaacattgcaagtggatggcacagagccaggccctgaggtgggagcctggccagttgtggggacagcaaagaagtcaatgagagcgggaaaaaatggggtaagggagatgggtgggaggaggtcaagattatggggggttgggtgcttttcgaggtccttggctttgccacagtagggtgggtgctgtagggaagggttttgaggggaaggggcatgatctgactcagggttcacagggtgcctccctccagctgcagtgctgagagcagctacgggggcaaccactgggaaattgggagacccattagaattgaattgcaatgaccccagggagagatgagagtggcttgaagcaggcatgaaggtggtgagaagtggtcagatgcctctgcggagtgaaagggtaaacatcataaaagttctattgtttggcctggtcagatgcctctgcagagtgaaagggtaaacaccataaaagttctatcatctggctgtctggccggggtggtggctcacctgtaatcccagcattttgggaggtcgaggtgggcggatcgcctgaggtcagaagtttgagaccagcctggccaacatggtgaaaccctgtctctactaaaaaaaaaaaaaaaaaaaaaaaaaaaaatttgctgggcgcggtggctcacgcctgtaatcccagcactttggaaggtcgaggcgggtggatcacgaggtcaggaaatcaagaccatcctggctaacatggtgaaactccatctctactaaaaatacaaaaaaaattagccaggcgtggtggtgggtgcctgtagtcccaggtacccaggaggctgaggcaggagaatggcgtgaacccgggaggtggagcttgcagtgagccgagatcgcaccattgcactccagcgtgggcgacagagcgagactccatctcaaaaaaaaaaaaaagtcctatcatcccataaaaccactcactcctcattgcagccctagacttgctctacccacacacttcaaaggggggctccgcgctcttcaccctcctgcacccgcgcccatccaggagtcagagcaggatgttttcctctaagggaaagcaaagcgagtgtgcactcgtgcagaatagagtttgggccactcatttgatttctttgtagattttattctcgtcttttttccaataagaaacaccataactaatgacttcagagaggctcttcctagtgtatttttaagaggagaggcagtattaatagttacagccgcatggcaggtggccctctgtgacccgtcacagtgaacagcaagctcttggggccctcttaggtttgcgctttgaggctcctgcctgccctggtggttctagagtcccccagattaccaggcctgaggcttctgaacatcccctaaacacagcctaacttcccaacagtctccttccccttggggagtctccaaaaggagattttttttttttttttggagacagaatctcgctctgtcacccaggctggagtgcagtggtgtgatctcagctcacccaagtagctgggaatacaggagtatgctaccatgcccagctaattttttagtaaaaacagggtttcaccatgttggccaggctggcctcaaactcctggcctcaagtgacccacccacatcggcctcccgaagagctaggattacaggcatgagccatccctgcccagcctgatggttgctctgaaatagccagagagctgggatgcggtatagagcagtttgtttcccagtgctgccttgagcctgggttagatcttctcttcatgccaatccaggccttctgttttcaaagtttctcttggagtctcatgggaccttggcttctcctgcagcatagtcccacagcctggccccagggtggcgccctcctgaggtactcagaggtgtgtggcgttgatagttggtgggggcagcttttagggctggaggtggtaggctaggactgaatgacttcagccgagattggctcctccccactcctcacggtggagatcccagggtgagggacctgcagctgaagtccgtccatacaggcagagagactgagggtgattctcagatgagtgtgggctggtcacttgcaggccttcctaaagcccgtgctggcgtttctgattcagcaggtctgtggggggcaggggcttcttcactcttaatcagttcccagccgatgctgatgaggctggttcaaatgccgtgctctgagaacacctatacttaggtaacagggcacctggctgcctgtaggttacctgtggcctctgggctggcactgctagttgtaggcgatatcctaccggttaattttaacttggagtcttttagaggacaaagacctgttttggtggttcactgagttgaacagcctggtgggctggccttcccagcgcttctcatcagtctcagggctgcgccgccaggccctaggtgtgcattgttctctctgctaccggtggagtctccaccaccatagaccttttctaggacatcagcttggatctccccagctcttccactctgtctggcccctgagcccagggagtgtgggcagcatggtaaatggggacagccacgtgtggggaaccgccatgctcacggactgcttgtgacagtgggaagccttcctcacccacatggcaggggcatgtctcctggccagaaggctgtgctccatcagaaccaaatcagggctctttcacacacccaggactgagcaaagatatggcattagcctgggttggctgcggtctctggtgctagtttgtcttttgttttggccagatgactcgatatttctgtccctcagctttgcactatgctgggtattggtgtcagcagttgctgttccaacctcctcatgtaaatgaacccagagccaaactggatgcccctcagcctttgtgttaatcacctaccccagagtgtgagctgagaagcacccggccctctccccatggtccacagccttctccgcatgtgattaaaacttagctgtgacgttctgcagtagggccatttttgaaattgtgcacttactgcttcagttgagataagtaataagatttcggatgtgattgtttaaagtgtttttaagtagccatagcatacagttgttcaaaaagcagaaaacgttcctaaattttaattgtctagtgttttatagtcttatttcctgttagttgcattaattaaaggttactgcagaacagtctttgttgagtggaagtattccttagaagaggtacaagcttttggtttctatcttgctgaatagtctgcaggacgaaagctgcatgtatagaattttaaaatgcagcaactttgttactcttgtcagaggcgctggaaccggtgcaactccatcttgaatagaggctgggtgaaataagactgagacctactaggctgcattcccagacagttagggcattctaagtcacaggatgagataggaggtcagcacaagatacaagtcataaaaccttgctgataaaaacaagttgcagtaaagaagccagccaaaacccaccaaaaccaagatggcgacaagagtgacctctggtcgtcctcactgctacattcccaccagcaccgtgacattacaaatgccatggtgacgtcaggaagttaccctgtatggtctaaaaaggggaggcatgaataatcgacccttgtatagcatataatcaagaaataaccatcaaaatacctccccagcattaacatcagcacagacctaaagtctgataagaaacattttataacctctctctgaagactgctacctggaggcaaaccaatttatttcttaaatatgcttgattgaagtctcaagtctctctaaaatgtataaaaccaagctgcaccacgaccaccttggtacatgttctcacgatctcctgagggctgtgtcccggaccatggtcactcatatttggcacagaataaatctcttcaaacattttatagagtttgactctttttcattgacaagaccatgcagagtaacttctggatgttgccatggcatttgtaaactgtcatggccctggtgggagtaccttttagcatgccaatgcattgtaattagtgtataatgagcaagaggacaaccagaggtcactttcatccccatcttggttttggtgggttttggccagcttctttactgcatcctattttatcagcaaggtctttgtgacctgtatcttgtgctgacctcctgtcttatcctatgactaagtatgggtaaccttctgcaaatgcagcccagtaggtgtcagacttaccttacctagaccttatccaagatggagtcagtctggttcaaatgtgtgtgacacatttagatggtcacaggggaggtgaagggccttcaaattttattttggttcatgatatggcttggcgtgtatgcttttcatttgtaaaattgctgttcttttgacaatttaagtgactgtttcattgactacaagtttgaaaataaaaattaattaagaaaaaaattccaatgactgtgctgtggttggagactttatttaccaagatgtttaccctttcctttcccctctcattatgagcagctgtgtcactgctcctcctcctcctcccctaatgctttgtaatctctcctatgtcataataaagctacactttattctgaaaactggccagttctccttttattgacacaagcagtcaaagagagggtggcaggagggaaaacagcagccagggcagaccgacctggatggggcaccctggtcacaagtaatgccatgtaggctgccatgatggcgataggtagagccggcaagtctgtgtccaggtaggggcttcctacagtgaaggctgatctcagccccctccacagtgtgggcggcctgcccacaggcagcccgctggtcctcctgggaaatggtgccggcccaggaatccacagcaagtctctcatcatcagatggggtgctcagcaatggtgaggcgggcgtgcagcaggcagggccttgaagcctccaggtggcatattggcatgtgaagccggggcactcaggacacttttgggctgggctccagagatcagactgcctgcactgcagtgatgaggctgggaagaggcagcagtgttcacagctgttggccgcattgagccagccctccacatcctcattactgcacggtctcccgtcttgcccaggttctctgatgtgaatccttacagcatcagggctcacagtgccctggtcccctctgtggtcaccctgggagcctgtggtgcctctggtgcctctctcttcctaggactcgagttgaagccagggacctctgggcctgggactcacaggtggggtcagaggccccagggcatgctgctggctggctggctggctggggctgcaggaaccctatgcttagccttccctccagaggccttgatgggaccaagccccgctgaatgggattttccaaggcccagaaccaaggtccagcagccatctggggctgcgacgcagctgggcgtgtgccacctgggctccttccatgccacgttcttctactgaggggcatcgcaggcaggtgctgccttgttgctggggtgtctcctgacctgcctcctctgtcataagcctgggcagggcctggtgtcggggtcccagtgggcttgctgggccaggcccgtcgtgtggttgcagggctgtccaggtaacatgttgaagtgacaggggcccagtagccctgttcaaaattgtagtaaggaaaccatggatcccagcatccaggtctgtgtggaggtgtggcatagagtcccagcacaggtatttttatgtaatacgaggcctgacctcaccgggaaacagggtggccacatcttgatcctctgggccacccagagagcagcctgctgccctgggttctggggaagccccttcgtgctgctgggccttggcctccgccatggagacaaccctgtcaggccaggctgggggaggacaaggcttttgtcctggggggctgatggcatgagcccctggagctgagctggtgggctgggcagggccaatctgtccccctcacagaggggcctaatgccaggagacaccctcgaggaccctctctcgagttctcctgaaaaaaaagaaacagacgtggtcggcatcttcaccaagctcatcgggtcccttcagggctgggccccacaggcctgggtctctggagtcctcggggtccctgacactgagtatgcccccgcaggctgctgatctcagggcgaggactgtgtgcagtctggggtcagggagctttcagggaacctcaggttgctcctgaaatggcccccagtgttcaggctggctcagggcttcctgcctcatgccctcacctcaggactgttcggcagccccaactcagaactcaactgggagggacctgcactgtcacccagcccccttgccaccacacatgggggcctgtccccacagagcatgagaaggtcccgggcaggggttcccctctgccctccaggctgttcaccccatgccagggctggaccaatcccatgtccagctgaactcttggttctggctctgggtcagggcttcccctatcctgtgcctgaatcctcttgggtcagggacactgattctcttgtctccctggcttgttgtcttgacatccttggaggggcactcaagaatgaggggtccctgctgctctctgaggctgcttgaaggtgggggtgggggcttccacagctgggtctgactgccccagtgtccctcagggcccttcgaggaggagaggaggacagtgtggaaagtgcgggaggggtgttggtggttcctgcccatggcccctgcctgtccactcagcatgtccagcacacacacacacatgcgctcagcgcctgccctgaggagcggcagacccatttgactttcttagagtagaggaggaagaggaggaagaagaggtgcaggaggaaggccagataggagggctggcggggccaggacacccccaaccattgactgccccagagggagactccggaggggacctggtgctggagcccacctggggatggcaggtcccagtgtttttttgtgagttccttcatagaggtttgaaggttcctgaggaccgagttgtcctccagggcccagctctgagagagtcgctcctgaaactcccagacggtgctccaggaaagcttcatgaggtgctctagggagagggcgggcatcaggccaggagggttccctgggaggggtcagtgcccgcaccccgtttccaccagggctacctcccactgggtggtgccgggtcctttttggccaccccggggtcgagctgtgcacagaaggccacagctaggggaggccgggcagggaagtgctccccacactcctttcatctgggtcatgttggggggtggactcagtgtcatcatgccttgcccagcccaccaggccaggccctctgctcggatggagcagagagtcatggtaacagtgtgaggacgcttccctcaggccagcggaggtctgtcccacgtgttcccttgggcaccctcaggcacatgggacttacccctgtgtattttgaatgatgcatgcgccatggctgtcagtacctgctcgccctccaagataagcacatcccacagtcgcagggtgagcccgaaggatttctttggggacagcaggtgtgggaggacctggcctttccaggctggggctggtggcctgagcaggacccattggggtttcagtcctctggagtgctgaggacccctttccatgggatgagacccctccatgaggctgcggtcagacaaggtcctgcagctcctcatgggggactcatctcagcagtgaggtggcttctggaagaaggggcttcctgaggacttggggcttccctgggcccctccaagttgggtcctagcccagtctccccatgaggctgggcctgagccctggcctctgccgtgggatgccccctctcaggcagagcctggtttatgtgccctgtagggaactgcctgtgcctcctgcaggctggaggggatctgaatcctcctggcggagctcgacccctgggctgggggtgccgggcactgcgggacaggagggtccctgggctggggtctccctgtgcctccttaccccatcaaggaaacactggaggagcctcgtcagcatggaaccctcaatgcatagcccttccttgccctgaagggaggagcagaggtgctcagggccccttgggctgccctgaagtcctcccacttccaggcccctctgtagacccttcctcaaggagcagaatccagggcggtggccagggctccaacacctgccccatgcacggatgcccagtggacatacttcccttagccctgcttagccagagcttggccctggtcccagcccttctgcctcccccagggcaggaaaaggaaacccaactccgaacccttggagaatccccatcccaggtcaggctgtggttgggacttggcctcttgtcagctctgtgagagactagagcctcccctggcctgtggggcccagggcttatggggaggagcagagggtgtcatccactcaccagctgtctcatgatctttgggaaggacttgtgcagcacctgctcctgatgtgataggagcttccggagctgggcagtatttgggctgtggaatactgagaagctgccgacccatcaccccatcagagcccacgcccaagatgtggaggcatcagctggaagagctgggcaagatgggggaccccggaccccgaggcttccctccttcccatctggtgaccccatcatgcggcctcagccctggggaggagggccctggctgggagcgctgcccggcggcatcctgggttgaggtgccaggagggcagcctgcctttgacaccatgaggtagggccgaggcaggcaggtgctagcggggagaccggggtgggagctgggggctgtgtggccatctcctggatgtgggatcaggctgggggacatgggatgggcagacattgccatcttggcttcatcggcccatccataggaagggagggtggctgggagcacagccagctgggaggcaggaggacactcagggaggtgagtggcgcctgcacaaagttggggctggcttcgggcaacagagggtggccagaaaaaggtgtcaatgctctctgatgttagggatgaaacgtgtctgacttgaggtttaagggtccatgtccagacccaggctgctgtgggacctcagcagggacatcctggaggctccaaataagctgggatacaaggaaagcaccttgactggaagttgggatcaccggccagagtggctgtcccctggcatgactgtgtaaggccctgggggcagctgtccacctaccctgcagggagtgcctctcaccggccagcagctgagccagccacccagaaagcatcttcctccggcagataaaggaggacggcagtgttgcggctcaggtccctgtggtagcccacctcctgcaagagccagagtcaccgtggaaggatgtcacctgggagggctgaggccacctgggaagactcacatcaccagagatggcagagatccttggggacacctgccacaggcccccggggatttggggtgggcatgaggactgagcaggtcacgtatgactcagctgacaaagagcctgggggactcctgcagcgagcgtctaagctcaaatggccctaaagggcacagtcagggattgtttatgctccttcccctaggcaggctggggaggccactatgccaggcccggagcagcacctgtgaagtgcacccaccacgagggcaggcggcagggtgctgaccaccacacaaagggtcctgcggcgactcaagggctgcctgcccggcacaggagggcggctgggtccagaccccatgtggcagcccatggagtcggctcagcagctctccctgcctggaatggtctggaaagtggggaccgagcaggaacagccacctgggtgaccccctccctgtctgctgcactcctatggggttcaggcaaaggggaaattggatctctgtctggtttctggtgaagaagaggcttcctcaggatgccaactcatttcatgacaagagcctggcccatcaggcaccccagccacttgtcaaacctgtctcctgccagaaccatctgcatgcgcccctgccaagctcctgggctttggggcaacgccaggaggggaaggtcatttcttcatctgagacatggtggtcggatccaggtgacaccaggagtctgggcttcaacccttttctgtctcagtttgaccccttgagccgcccccttgcttgggtgtccatgctggcaagtgagcttgagtcctgcctactacgtcctggtgggtcacaaacactgaattttcaagaagtgctgaaacccccgagaggcacctatgcctgtgagtatgggcacatggcccaggactattgctgcccgggaatactctaaacatcatgtgattctgcagggtgtggctgacatctgccttgatgcggtgggtgatcctggaggacctcttgcccttctccttcatgacttgtagggcagggccaagaggaggaagcagcctcagaacagacaaaagactccctgcccctaacagctgtcatcccacagtcagcacttctggaaggaagggaggaaggtttccttctgcagaaagttccttttttgccttgtttctgaagccagggagggtcagcagagcccagcacacctgtggtgcctgtgtcaccgtctgtgcctagtatgtgcatctgactacagcccccacccccaacccgggcttgacattccttccggctggagtcctgggctcctgacacagcctggcctatttgtcctgccctggctgagtgtgggagggccttaccttgtatttcctgggttctgggacttgactttgtcaatgtctagcagaagtgcccacgcctggcctcacaccaggggaatgcctttgtacctgcttcgagacagctacagacaaaagaacactccagtgagacaggatgtgtagtgacttggggaggaaagccggtaaacaggcctgctgtcctatgatggggatggagtgccacccatctgctgagaggcagatggtgccaggtcatggccatgggtgcctgtctcctgactctgcagagagcagtcatggaggccactccctccccacgttaccttcttttccttttgagatgaagtctccctcttgtcgcccaggctggagttcagtggtgcgatcttggctcactgcaacctccactgcctgggttcaagcaattctcgtgcctcagcctcctgagtagctgggattacaggtgcccgccaccgtgcccagctaatttttgcatgtttagtagagacggggtttcgccatgttggccaggatggtctcgaactcctgacctcaggtgatccgcccacctcagcctcccgaagtgctggggttacaggcctgagctaccaggcccaaccgccatgtcaccttcttgctgttcttatattttggccagtctccaagcatcttcagccacttgtcagtacattttatttcctgacacctttgctgtcaaatgagccatgatggagttagcggagctgccaggcctccggcagcggcccatggatgctgggtcctgggctttggggccctgaaggagcaaggaaagagcagagcccgggggctgagaccctctgaactaactggagctggtggtctggactggtcatgccaggacacaccatcctcaggccacagacaccccgagttttggtcaggtcctggcccttagctggggacttggtacaaacaggcagtgacctctgagccaagactgtggttcttgatttgggttttggtcaaatgctcatgggaacagagtccgtcaggaaaggccgcccctcccagggacagccctggcccacttaccaccgcccgggcccgcaggccaccccctctgtctcaccaaccactcctgattccctgtccctggaccagtctcccacgcagcaggcacaggctcttcccttcacctccagggcactgacacgggcagctctgtctcactgtaaggcaacccaggcagagctgacgacctacctgggccaggagccatcctcatccatgagagggccccagccctccccatccaccctaagtctcagcccgggagaaggcacagggaaggaaggcaagggcctccctgtggagctgatgcccacgaggcaccaggaccctggagaagagggagctcgaggctggcctggagggggccactcggggcctgtggggtgccttgggctgcacaatggggctgctcctcctgggctggaggcgacaccctctgtggagctgagaaagtccagtcctgagacgagatgggtgccacccagggtgggtggctgagccctgactgacagcagtgcctcgtgagtgaccacatcacccaccagagtccagggagcctggcctgagagctgcctagtgccctgaggacgcacctgggacctgtcccacctgacactccccataggccttgcagggtgtgacctcccagcgttcacctgcctctccctgcatcccggctgcagaccctgcctattcctcatcttcccccatcctgcccgccacagagactgtgaccctctctccggccaccctggcccttccaggaccctcttcctgtcagagcctaggtatgagaccccccaggtctcttactgggctgctcagcgctgctggggagaagcctggggtgacaagggtgaccaagggccctgcaggcagtggggctggccccaccaccctgcctacagcctcagctggctctcagggcagtcagccttcaaccctcagcctcctcccagccactgcaaaaaccaggacatgggatgcctggctgtcctccccctactgtcctgcctgccccgactcagcctcccgtccaccttctgtggtgctgactgagccagcaggaagcagagtctctggagggccacgtagagcttggggactgactgagtcacccccactgaggggtcccaggtgagccgctgttccctgaccaccccatctgttttcctccccagactatcagctctaccctgggccagcttggttcaggtgcatcccagaagtggcaggtctcaccggctcaccgccccccaatcccaggctcctccctctctccatcctgtgagtcctgaggggccggctccaggctgggctccccttaccaggcccaggtcccttcccagcaccaccactcctggggccttcagcttcaggctctgttgccccccaggcctcactgtgggatgcccaggacaggccctacacttcttctcccccagcctcccagggtcacagcccttgctgtccccatgcccctccctataggatgccccagtgggccccctgagcccttggagacctgctacacaacagcccacaggcctggccaggtgtccccttgccctgtggccaccaccctcagatctcaccagggcaggccccaaggggacagggccagacccttaggctgccccctcgtctcctgctgatgtggagagctcagtgctgaaagccccgggcctgacccagccccctctctgtcccacccgctctctcgagctccctagatgggccttgaggctctgccctaaccctgaccacaggctggacttgcaggagaggcagagaggagttcttaccctggagaggagattgtcctgagccagggaagcctgccctacctcagagagacctttctaaaaacaaaacccatccctgaggtgagacttgtgggtggggggacagaggactcaccacacaacccagagacgactggtgaatttccagatgtcaacacgctcatgctctgtgtccactgctgccccagctcagcgtccctgtgacccagcgagggccagggagacaggggcaaggtgaagggcttggggtcctgacggcatggagagcctgtcttcaccctgtggtcctggggagcccaggaccctctgaccaggctctgaccagtgggggaggtgaggccccaccttcctcaagggagtggcccgacctgtacctgctcatacttagtaatgatgatgttgccttgcccctgggtgggcaggatatccgggtgctcatccatctccatcctgcaagacaaagtcatccaaaggctctgcagcacccgagagctccagagaacacccgaacggctcccaccagacccccaaatgctggccagacaggtgagccccattccacgattgctccccaagacaaagggttaaatccagtattcccacccatgccctagtctctagagtccctgccctggaccaggagtaggctccttcctgaggacttgaacacagggggacctggacagagaggcccattgttcccaaatgccctaagacagacacacacttgccctggcaggaccaacggcgtccacctgctgagggtaaagggcccacgatgggctgttccaggcacctggaggcagttggggtcaggaaccagacgtctctataggatcagcctcctgggatccttctaggaccatgaagatgcccagttttctgtaggaagcaagacatctggtgactgctccattctgctccaattctcactcactctggctggtgaagccgcttcaggaacaacaccagctaagcaggagggcatttggtttgggggaaaaatgacctattgagtccaaagcagcctctgtcctcgtggagaccctgtgctcgtctcaggtggaggacggtggactccacaattcccagctgtcaatacaggagggggcttcgttttcctggatcaccaaggaaaaaacaagagaattctggggacttggtcctggagaacacccagggggaccatcttccttgggaatacttgggacaaagggaagacaagacctctagagaatcagacagagaaggttccagtccccaagcccctttgaccaagagggacgatcatcaccctccaggcagccctctagagctccttcattttccacaactgcccgagggcagaggcctccccaccccactcccagacgaaggactccatgtgtccagtgggtcccacagcaaccatcagtgaccgcacctgaagtctgagttgatgagacctcctcctgtggggaccaagctttgggcacagacttggactgagaatcaccccctccaccccatcagggtccagaaccccagggaaatgtgggatctaaggcagggaggctgcaaaggtcagggcttgagtctagcactgcacagggcagggctgagtgcacggcccaggccacatctgggtctctgggccagtcatcacctctctgactctagacatctcacctgtggaatggctacattcggggacaggatccgccccatggagttgctgtggggatgaaggaaaaggccatctacaaggtcagcacaaaacctgcacctggcgagtgctgagggatgctatgactcatccccactatgaatagaggcaaagaggctccaaggacaaaccccctgtcaggtcatccagtggccagctggccaggcctctgctagccaggccctactgagcaggccccgtgactatttccccactgatcatattttcactaagccccagtgtccaagtctctgctgaccaggcccccctgacccaacccatgatgaccaaatctctcactgaccatgttctcaatgacgaggaccccgctgcccaggtccccacttcccaggtcccaaagcagcagtgctcaaagtcccctacctaactgcccaagggcagaaggctcttcaccccactcccagacaagggaccccctgtgtccagtgggtcccacaatgaccctcagtgaccacatgtgaagtctgagttggtgagacctcccgcggggtcccagcttagggcacagacttggactgaggaccaccccctccacctcacccataggatctctgtcccagtggctcttccagggccagactctgccccatcaggggctggaaccccggatggatttggaatccagggcagggaggccacagaggtcagggcttgagtccagcgtagcacagggcagggctaagagcatggcccagggtcacatctgggtctctggaccagtcgctgcctctctgaccctagacatctcacctgtggaatgggtacattaggggacagcacccacccccaccagcgtcactgtgacgaccaacaagacgaacatctataccgtcagtgcagaacaggcacctacctggtgagtgctcagggatgaccctcctcggcacccgcccagaggccagcactgcctggtagcgactgtcccaggtcagcagggagggaacagagcaggtcacactcagctgagtctgctgatccaactgtgcctctcacttaagaaagcctcctctgagcagaaccagacatcgctgtttatcttgtctctaagagctccagacacagagaaggcagccaggtaggcgggtgggtactcagcaccagtgacattacgggatcacggcacccatcacaatgggcccccgcctgggtcagcagggcccacagtcaccgtcctccacccccgaagcatcaacatgtgtgcatgcagtgtgtttgtaaatgtgagcgtgcacatatatgtgggtgaacacgtgcatatggtgtgttgcttctgtggctgggccaggtggccccattcatgtacgcactcaggtccttgtcactgtcacgcccggccctgggcctgtggccagcatcagagtgtccacaggtgttccccaacctcagccctccctaggtggggcagtcctgtggacggggagcagagaattgagggtggagggcagagagcaggccccctctttagcaggggactcagctagggtgtaaagtgctaggtctgttgggcagggccggattccacacacctgctcatctcctcctcccagtagccctctggggtgatgtgactcatccccactacagatggcggcaagcaagctccaaggacaaacccctgcatgaggtcacccagcagccggctggccaggaccccactaactaggcccccactgaccaagcctcccccgacaaggccgctgctgaccaatgcccccccacaagtccttcactgaccaggtcctcactgaccaggtcctgactgaccaggctcttgatgaccaagcccccagtaatcagatctccacttaccaggtccccactgaccaagacccattgaccaagcacccagtgaccaggtcctcactgacagtccctcaatgaccaggccgcctgaccaactctctgatggccatgccctttctgatcatattttttgtgaccaagtcccagtgtcctagtctctgcttaccaggcctctactgccaaggtccctgagccatggagctcaatgtcttctttcagtgacccgcttcagtcctcagagccacccctccccacattggcacccataagccaggcactggggatcttctcaggtcagggcccctcctctgggacacagggaggggcactcggccccaggctttgggtgcccagcttcatgctcaccccacaaaaccctctgggcccatctcaaagggggcagtgaggtgacctggcaccacctggacacactgtctgggcctattcctgagccacacagccagaggaacggggggatgttagacaaggcaccccgctctgttgggcctcccagggcccttccctcagagcccgaatctggtgacacagcacagaggctgcagggtgaccagcccagaacccttgagactaggctggggaccacacaagaactgtccacagacagccagaagatgctttgctagtttcttgatacctcatttctcaccagctacccttcccccaccaggaatccccttcatgcagagtcaatgaggagaggaagatgtcacagaatccgtggaaggaaagaaaacaaaaggtgggtggggagaagagttgggagtgtagcattgtaagggtcctatactatgcgtattatttgagggttggctgtgattaattaaaggtgtttcttgcagacaaccattacacacacactctcacacacacacacacacatatatatatatatatacagatatatatatgtgtgtatgtatatatatataatagagagagaggaggtctcactctgtcgcccaggctgaagtgcagtggcccaaacacagctcactatacagccttgacttcccaggctcaagcaatcctcccacctcagtctcctgagtagctgggactacatgtgtgggcccccatgcctggctgcttttgaaatggtttgttgtagaaatgggatcctgctgtgttacccaggctgatctggacctcctgtccccaagcaatcctccaggctcagctggaagtgttgggattacagggatgagccactgcacttggcttagacatgtttttaagaagcataaatacgaatttcagtgttgccatgaagtcaggcaggggttggcaaactatggcccacaatccagatgcagtcccctcctgtcatggtgaataaaggtttattggagccacagttcctcccctgtgttcacttcttgtctgtggctacttagggctgcagtggcgaagctgagtaactgctgagtaggtgcaacaaagaccacagggtccacgaagcccaagatgcttactaccaggtcctttgcagaaaaatcttgctgagccctggggaggggccaggtggcagcggggaggccagtggggaggctggtacagtaatccaggtgaaaaacgatgagagctcagattaaaactatcatgacaagtggctggaatcaggatatattttggggaaaggaccaacaatacatagataaaatggacagtatttagagtttcagattttctttctaccaaaggatccctttctaaaaaaaaaaaagagtacaaaagatcaattttaaaaactgaccaaagaaacaccaccacaagattatttgtgtgattgaagctggggttgagcctgggtaccttgtgttttcaacacccctaaaaccccggctgttccagaggcacctacagagccccttgggttcagacgagcagaacttgaaaccatggatcggaaggaatagaaatctgcatatctttcacacaagccgtaacattctaagccgcatatttgcaggacgctgacgtggggctacttcacccacagccagcaagcgtctgcgccagttctgggatttgtgtccaccttgttgtaagaaggcagctgcttgcgtgaggcatggcggtgaggaaacaatgccacccggatctcaccattggccgtgtggactggctgtaccatgggccagacgcatgtcttgggcagacactttttagatgccaacttgcctgtagacaaagatgacgcagaggtggcctcgaggacggcctgtgtgatgggttgaatttgtcccccgaaattcctgtgttgatgtcctaagccccagtgcttgagaatgtgatcttatttacagatatcatcttatagaaataagttaaaatgaaaaatgaggtcagtaggggggcccccaatctaactactggtgtcgttattataagaaaaggaaatgtggacagagacacacagagggaagacgaggtgaagagacaccgggaaggccacctacctgccaggagagaggcctggaacagagccttcccgcaccgccctgaaaagggaccttccctgccgacaccttgatcttggacctacagcctgcaggactgtgagacagtgagattctgttgctgaagctgcccagtctgtggtactttaaggaagcccaagcaaaccaatgcagcgtggtagcccacagctggtgaaaagatggaatgagcgacggagccccaggcttcctgtctacacctcccaaagtgcgctacgggatcctttggtgggtgcaggtttgcaagataattttaggaggtgcagggtgcataatttcaatgtacattattatggatttatcttactgtgaaaatgcttctaagaatagtttacttaaggtttacatgctactcaagatatagctttaaatgctaacaaaaagtggactcaaatgaaaacattctcttgctgtggtccagggaatcttgatgttttttccagagagactcgcagctttcagctacagctgccctccccttcctgtccactgcacatccccacaacacacacacatatacatacatacatgcacagacatccacacgcacacacatatacgtacatgcacacgcatacatgcacacacatatgcatgcacacacctgcacacacacacacacacacacacacacacactgtgcgtcatgcccttactaaggaggcatggaagggaatgtgtgtctgtaaggaaatgaagatggctcaagcccctggttccctgggtgtttgcacaggcaccctccctgcagacctttctttggtctctttctctctcttagtgaaagagagaagcagagccccagtgggtacccggctgcttagggctcaacccaaggtcacaagcttcctcgagagcctggtgagatgggggcaccacagggcctcccaaaccaagggggcagcgttcagtggagcctgatgcccaggaaagtgatagacaagatgtctcagttcatcaaagacccaaccacaatgcagtgaggaagggcagctgccaaaggttttattctccaggaggaggggctctcgggggctgtgagcagcaggcacgaggactttattgcacgtgtggttaggtgatgacgacctacagctgcactgggaactgggactcagagtgccccgacctcctgctctatctctctctgtccctctctccctctctgtctctctgcctctctccctctctgcctctctccctctctgcctctctccttctctgcctgtctctttccttctctgcctctttccctctctgcctctcttcccctctgtctctctctccctctgtctctctctccctctctgtctcctctgtttctctccctctctgcctcctctgtctctctctcctcatatctctctcccctctccccacctctctttctctctcccctcctctccatctctctccctcctcctttccctccctgacccccatttatgcacctgggcccccctcctgggcaggcacacacacaatgccaaggccactgtctgggatgtgtgggcaaggctgcaggactgtggtcctggtgtggcacccccaccttccagcacaagtggggtcgggggtcccaggcgtgactgcgctctcctgcgtgggcgccctgcactcagggaagcagaagctgcaggtctccactggctcgggggatgtgctcacagggctgccggcttccatcgcgtgatctgcagaggcgagagtggagggcgtgggccaggcctggccctgcactagggtaggggtgacggtgtgggcagccgcactctcccccgacccaggagctaagggcaatcaccagcgtagaacgcccccagacaggtgtcagtgtccgccagttgctgaccagaacctgtgccggggcaggggtgggcaggcaattcttggctctcacttctgtccagcaccgagcctgccacgccccccaaggggacacctcctcctgggcttagccctgaaggctctgcatctggagaatcctgggcccaggcaaacctgaagaccggcaccccacacccacccttcccgggtgccactctcccagttatctgtctgccaggatgtcttaacctgattttatcaaggtatagcaagtaacagggatgagccctgggcctctccacctagaagcaggggcagtgacaggaccgagggatggcccgaggcttgtcacccaagcagcgagaagggcgaggaccccagtttcatgcactcaccctgggaagacttggccggactttgacggggccttgagcggggctggcaggagcagggatcccccctcttcttgaggaagcaggccaccgccaccaggaagcagcagaggacggcacacaggcagagccccagcgtgctgtagaccagggccacctgatctgcactcagcttcagccccgggagagctgcaagacagcatgagacccctctctgcagtgccttcttctcttcccgtcattaggctcaagcaatccacatccccccatccccctgctgtgagcctgtctggctcctggagaggctgggctccttttctgaccctgaggctgctgggatgctctctggatcctggaggaagttgatccactcccccatcctggcagcaactttctaaggcctcaaagctggaaacgtgagctaggccttcttgttgtctccacttgctagggctgtaattgggacagcgctggagatgggctgatgggtgaatcgacagacgaacagacgatgctccagggagcatgtctctgtgcatcctgaactgggcccttcctccaaggagaaagcttcctgagtgagcgtttacagtcgtcccttggtatccatgggggactggttccaggatcccctacagataccaaaatccgcggatgtccaagtgcctgatacaagacggcctggcatttgcatataacctatgcacatcctcctatacaattagagtcatctctagattacttataataccaaatacaatatagatgccatgtagaagggtgttatactgtattgtttagggataacaatgagaaaaaatggctgcagaggttcagtacagatgcaactatcccctatcttttctgagtattttccagctgctgttggttgaatccacagacatgggtcgcacgacacagagggcccactgtgtttgagagtaggacaggcgacgttacactgagaccaggacagcaggtgccaaccaggagggctttgggcatcagggcacctggccaccctatgactcaggacttgtgcctccaggtttggatgccagagacagactcagcccaggtgaaagccctccccttggaagttctccttatcccaaaagctcttccttgtccctggagctgggcatcctctaggcgctgggtggaaagacagatgagccagatttaagatgacacgtcaagaagagcgagtcccacttcgtgccgggcacttcccctacagcacccccttcatcttcccgctctgatggcagacaactacccccattaaaaatactgagaatttgtataccatcaaatttgctgtattaaagtgtacaaccagtggcttttagcacatcacaaggttgtgcagcaatggcaactgtctaattggagacaatttttatcaccaaacagaaaccctgtctcatcagcagtcactccccattccctcttcccagcccctggcaactgttcatctcttttctgtctctgtggatttgcctattccagacatttcatattaatgaaatcatacaacacgtggtcttttatgcctggctccttgcacttggctttgagttttcaaggtccaccatgtcctgccgtgctgtgtattagaccttcgtttctctttaggcggaatggacagaccacatctgtttacgcattcaacagggaatgggcatttgggttgcttccactttctggctattgtgaatgacgttgctgtgaacattcacatccacatgtttgtgtggatggatgttttccattttcttgggtgtatacctaggagaagaatggctgggtcacataatagctctgttttgttttttgaggacctgctggactgcgttgcacagcatctgccgttcacactccattttacagatgacaaaactgagtgtctaagatattgttctcggtcttagacctgcacccgggagccggtctcaccaattcccaggccggtgctccaagcccgcgggccacacagcggccccagggctggcactgcccgtcttcctcacacacgcttttagattcaggaatctcataaagtgacagagctgccaggactcttaggggtcatcagtgtcactctgacatttacaggggggagatgggaacttggggtgagttcgtgtcactccgccagtcagtggctgtccttctgtccagtgcccagagctcagagaggcctaacggaggaaagcaaagaccccaggacctgcaaacttggtgccacatatccaaggcttacctgctcctattcacctctcaaatcaaatgcaaacactgccctggaggcatgagcaggggagacgctaccagccctcagagcacagacagaatgccaggctacaggttgttactaagcggaaatgaacggcgttgattcaaggaggaaaactaaacatttgtgcatatttcaaacatttcatcataagattctgaaacccagctttcagagaccatgcaagtgttcagagaccacacccagagcacagtcacctgacatcatgccctgtggaccttctgggctggactgggcctcatcctatccaggagagtgccatgggggcgaggttgtgccactccaggcctctgcctcaagaaggcctgacagcctcggtgtttgctcccttgggcctgagctaccactcgagaagtccaactggagagtcccagtggagaggggcaagccctgagatcagctggaggggaagcaaggcctgaatatcccagcatcagagtcaagcctccaatggctctatccccagcaccatctgcatgacagaccccaagcaagagcagcagaagacccgcctagctgaaccctgcctccccacagagccacgcagggtcacaacatgaagatgaggatctggtgccaagtgtccagatccagtgacaagtgtccttatacaagaagagaagggaagagacacaggcacgagagagaagccatgtgaagacagaggcagagatgggagtgatgcagccacaagcccaggaggcctagttctgaccttattcccagaaggggtcacgggcacccccagtgtctgcaggacacagaggctgagcagttccatggctgatcacatgccagcacctctccctccagttctaatctcatgccaatgcactgtccttctgtccccctcccaggtctctggttcctattattgccagaagtagcctctcacagggcccctgctgctatcgccaccatccaggggcaacagagagctctccccacagccctgctctgacccccttctcccatggctgcccctgcccccagcaggacatcagcctcccagcctggcacatagggccctctgtcatctggcatctggtccctcctagtgccatctccagctgcccctgaatccttgctcttcccaactcagtcctctgcaacccccatgttgggggacagggtcctgcccttggtgcttttcctcgtcttctgccggacagatgagcagccccacccagtagggcaggctgcctgggccacctgttcccctcagggagacacacacactccctgcacctgccccggagcccgggcaggaagctcctcgcgtcggcctggagtcgtcgcagtagaaccccacgccagtctcctctcctgctcaacatctcaagccattttcagtccagcttgggagcctgccctcctctccccaccaagcgccatgtgtgagcagcagggctttctgtgctctcttggtgagcatgtggagcggtcagtctctaccttcaaagcagatctggggtggggtccctcctgcttctgtggagtggccaccacactcctgcaggctgggagcccgagaggaagggatttatcccagcctccagcacagagcccctcacagcctcccaacggcacagttctctgctcctagcagcacctgtacatgctgttgcctctgtctggaaccctgtctccaccgtgtggcttcaacatagttgctttttgaatgagcagttccagcgcacagagcacatgctcccccaaaaacatattctcccaaatcaccctcacagcagctctatgaaggcgaacaactccagcctcacagaactaaggctcagagagggtcggtagcttgctccaggtcacacagcttgtgagggacataactaggggtctggctccacactccacacccgcaccccagcctgccctaaagactcctcctcggggaagccttccttgtccccgtgtcacctgcagctgggttacgtggctcccgtgcactgagaggaatttgtcatctgcgtggcttgtccactgcctggccttccacgagacagtgagctccatgggtctgggacaggaactgcctcattctccccactccccatgcacagcaagcctgccacagttccaggtcccactaaggagtggcagttctgaatgggatgcaagagaaacctggagtcagggtgaggtgggacctggcagggctggagacagggaacggcagaattcagggagcccacggaagggggcagagaacaggtgagcccttccaccgtgtgcagctggacaacttggtcacatggtgtcctctgctctctgcccttgaataggtccacctctgggtccctcccctggccatgtggctctgtacttcctgtttgcaatccacagcaagctcccctcctgccccaccagcccatgcaggcatcagaagtcagaacagaacagaccttaaccctgggcccctggagaaataaagggcagggtagggcagtgcacagcgacagtcacagagccaccaaaagccgcgccatggcacaagtgtggcagctgatgtagggtgaggcatggtaatgccgaccccactggcaccaacacatcctcacacagcccccaatgctcacagccttgggctccatccctggagccaagatgaggctccaaggttctgcccagtgccctctggcaagggggcttggctgatggtcacacacatgaagtggctaaccttgtcccaggggcaacagttcaccgccaaggagcaatagcctgcagacgccactctgggtcattttgctgttgcagaggggacaaactttggaacccccagactgtgctcaaatcccagctcactcacgcattccctgtgtgactgtcagcaagtcactccaaatttgagactcactctctagatctgtgaggtggctaggaatgacccacgggggaatctgttgcatcagaggtgggcaatgttccaggtttgcaggaagtttcaaatgcatcactggatgcagggaaggtgcgcaggtggccagacaccagggcggcaggcatggcccctcgcatctgtggctgggctcttcagcccctctgtatccacaccccctccatgtgaatctgcacttcttcccctcaggagaggctgtgctagattaaaaatggccttgaattcaccatggctacaggtttcccccctcccccagcttgctccttccaccaagaggtggcgtctgtttcccctcccctgaatccgctggcactgtgaatggaaagaaatgcagcggtggtgatgaagtgtaagttaccagcctaggtggcgagaggactgcgtgctactgtctgctgcactcctgtatcgtcatgagatggacgcacctggccagcccacttgtcccaggaggaggatgagaggcacatggagcagagccagcctggcacagctgagcccagccaaacccctgactcgggagaaagcacacacctccgcatttggggatggcttgttaggcagcagcagctaactgacaggagagcaggagatgccaggctaagcagggacaacagggtgctgggcaacctccatcatcaggcacacaggccctgcccatgggaccttagccctgggacctggcctcatggaaatgatgttatcacaggaaagtcactgcaaaggaaaggaaccaatcagccccaagaagagcaggacaggccgagagcagggcagatgccatcgctagtatttatggatccacacggcatccctcttctgtcctttctgatgccacagagcagggcaggtgcaaaaagaggtgtttgctgggatagggttaattagatcatttctgatgcctggcacttaccagatgcccagctcaacaggacccttcttgccatgtccaaagtggccatctccagccataagttttttcattttctttacttattttttattatttttatttttatttttatttatttatttatttatttttttttgagacacagtctcactgtgtccctcaggctggagtacaaaggcacgatcttggctcactgcaaccttcacctcttgggttcaaacaattctcctgcctcagcctcccaagtagctgggactacaggtgtgcaccaccagatccagctaatttttgtatttttggtagagatggggtttccccttgttgatccggctgatcttgaactccgaaccacaagtgatccgcctgcctctgcctcccaaagtgctaggattacaggcatgagtcaccatgctgagccttctctttttacaattttttttccctctggcagttgttaatgaactacttaaacattttaagtgatacctttcccttctctttcttaggaagcctcttttgcctctaaatggaatctgatgaattcacagccagattctagcagatgcacaaagaagagctggtaccaattctactgcaactattccaaaaaatcaaggagggtctcctttaactcattctggaaagccagcttcactctggtaccaaaacctggcaaagacacaacaacaaaaaaaagaaaaccacaggccgatatccctgaggaacatagatgcaagatggattacagatttaaatgtaagaccctaaactataagaatcctagagaaatcctggaaaataccatcctggacattggccctgggaaagaatttatgactaagtcctcaaaagcaattgcaacaaaaacaaaaattgacaagtgggatctaattaaatgaaagagcttctgcactgcaaaataaactatcagtgtaaacaggcaacctacagaatgggagaaaatgtttgcaaactatgcacccaacaaaggtctaatatccataatctatgaggaagttaaacaattcaaaaagcaaacaacaaataaccccactaaaaagtaggcaaaagacatgaacagacacttttcaaaagaagacatgcaagcagccaacaaacatgacaaaatgctcaacatcactgatcatcagagaaatgcaaatcaaaaccacaatgagggaccatttcacaccagtaagaatggctattgttagaaagtaaaaaaacaacagatgctggtgaggctacagagaaaagggaacgcttatacgctgttggtggaatgtaaattagttcagccactgtagaaagcagtttggagattcctcagaggacttaaaacagagttaccgttcagcacagcaatcccattactgggtatatatccaaaggaaaataaaccgttctaccaaaaagatacatacacacgtatgttcatcacagcacaattcacaatagcaaagacatggaatcaatctgggtgcccatcgatggttggataaagaaaatgtggtaaatatacacaatgaaatactacacagccataaaaagaaaaatacgttttttgcagcaacatggatgcaactggaggccattatcctaagtgaattaatgcagaaacagaaaataccacatgttctcacttataagtgaaatgctaagtgtcgaatacagatggacataaagacaggaacaacagacactggggcctactagaagggggaggcagagagagagggcaagggctgaaaaactacctattgggtgctatgctcaccacctgggtgacaagaccatttgtacctcaaaccttagcatcaagcaacatacccatgtaacaaaccctacacatgtacccccggatctaaaaaaaaaagttgaaattataaataaaataataatagaaataaatggagtctgcagcactggtggagggcaggtggtggctgctgctcaggtgctcacacaggtgggtctgctgcttacttgtgcctgtgcttcaatgactggcacagcctcggcagcctctagtgcaaggctcttcctcacacggcaggtcctttctcctgctttcttcttgtccacagacttctggaaatgttgcctacattgttttttttatcctgggatgatctccctggcttctggccatttgcttggactctgggcttcatgcattgtggactctcctgttctaggcctggcatcaggcctcccacgctttctcaccctgcgtgacaccatgcaggtttgccttgggtggcttacctggacttgcttctgagcctctgtgctccaatccttggtaccttcccgagttgtctgaattgttttcaacttctccactccgctgtctcctgagctctggtggaaggttcactgggctcctgagcttgttctcacagaagtatgcacattgcttagggtgctgtccacagatggaggcacagctgatgcagtccctcaggagatggtcatagaacttgccttgctccttgcggcagctgagtgaccctgggagagagaaattcatgatactgctgggtgacacagactagcaggaactctgggtttgaccacaaaggacatcaaagttaaaaaaaaaaatacagtaaaattccagaaggcaattccagagtaagccaagtacttttacaatatacacattgaagactatgcattgtcctctaagtactattttagctgcattgcattttgatgtgtagtatttttcctctacctagatcaaaatgcacttatttttcattattatcttttctttgacctatgggttatttacaagtgcatttcttagtttccaaacgtatgaagattttcagttatcatttaaaatttagatctggattacattgttacataagacttttacttgcatttttcaagcctcatcaaggagaaatatatttcaaatcagcataaggaaagaaggggaaaagccagaatcctctttgacaagctgggggagggggctggaaggaaggtggaaaagttcacatgaatagtgtttcttctgtcttaatactagatgagaattacagcagcttacacaagtatcagtgccaaggcacagaagccaaggaaactaaagccaaatcacacttgccttaagagagcacagtggacccaactttgaatgcataaagaaacctatttggaacaatcaattatcttatctaaagtctcagaatatttctaattttttttttttttttgagaaggagtttcgctcctgtcacccaggctggagtgcaatggcacgatctcggctcactgcaacctctgcctcccaggttcaagcaattctcctgcctcagcctcccgagtagctgggattacaggcgaccaccacaacacccggctaatttttgtatttttagtagagatggactttcgccgtgttggccaggctggtcgtgaactcctgacctcaggtgatctgcctgcctcggcctcccaaagtgctgggattacaggtggcatgaaccaccgcatctggtctagcctccgaatatttctacatggaagtttttacgtgaaaaaggcaagtttcctttgtatttagagtaaggtatggcttttgagatgtcctgacttcgtaaatatgaataaataaataaataaatatgtataaataaaatatatgtggctcacacatatattttaaggacacattttggagacagtgcaggatagtggataagaacccaaatttcagaaccaaatttcagttggggccatccctggctgtaccacttgcaggcagtgtggtcttagcctctccgtgcctcagtttcctcatttccaacatagggaaaataacagtactgacttcttcgtagggttgttggcagagttgtagggcccagcacagtgcctggcacatactaaatgctcacgtaatggaaagcttaagtagaatattcatttgagcctcttcacaaagcaaacagatccgttcttgtgtctttgacagagtaaaggaaggaactaaaagatcacggaattgggaccttagggaaaactcagatggcccacatagggccagtgacctcccctgctctggccctgccctatccccagggcgcccctgaaccgcacagaaactgacacctccactctgcatcacacagggttagcccagcattggtgtccttggggctttctgtgacctcctcccctgttgcaggtggtgctgttgcaggtggtgcctgagtgccccagcccactgaccctccctgcctgacctcacacccctccctgcctgacctcacacccctcccctcccccgcctgggactcagtcctccccactgtgtttccctcctctgagcctctgctcatagtgccctttcttccaggtgcccatctgatttccgcattctgtgacctcttaacaatctgcctctgatggtgcttcctctagggacacctccctgctccccagccctttagctgaagggggtctctcccaactgtggctttctaccttgacacatagtcatttctcccattagatgacactgtctttgaagggccacggcagattcctatttccatggggctggagcactccatctatgtttgtgggatgaaccaatgaatgttctaattcattaatgggtagtggttcaggtcatgatttaggagtcggagtcctgggttcaaaccaggatgtcgctgtgacatctccacttttaaactgggtgatcttgggtgagtcactcagcctctctgagttccccgcaataagtattcatgaaggacttactatgtgtcaggcactgtgctaggctcaagtcagacatggttcccctgccagggagctcccagtctagtggttgagtcagacataaaacacatacacatgaaagaacaaaacagcaaattgtggtaagttctatcaaggaaaagaacaggttatgaaaaagaacagcaagcaacgaataattttcaagacaatcagggaaaactggatattgcctgagtattagatgatgttaataaattattgctggcagtgataggatatttggattatgtttcacaggttttcgtggtccagtatctgcaggtaaaattatatgagatcttggctgtgctttaaaatacacaaggcaggctgggtgcagtggctcacgcctgtaatcccagcactttgggaggccgaggtgggtggatcacctaaggtcaggagttcaagaccagcctgaccaacatggagaaaccccatctctactaaaaatacaaaattagccgggtgtggtggcacatgcctgtaatcccagctactcgggaggctgaggagggagaatcacttgaacccgggcggtggaggttgcggtgagccaagatcgcaccattgcactccagcctgagcaacaagagcgaaacttcatctcaaaaaataaaaataaaaataaaaaataaaataaataaaataaaatacacaagtcaaaaaaattggttgggaaagtacaaggcagaatttaaacaatttgtgaagctggtgatgggtgcagagggcgtcattgtgctgtcctctctatgtacatgtgtgataagttctgtaataaaaagtttcaaaagaatgtaacaacacacagtgacaagggagggcctagttctactgggtggtcagaggagacccctgacgtttgggctgagacctgaaggttgagtaggagggagctgagggaagatgatagagggaatgcattccaggcagcgggaatagcatgtgcaaaggaactgaggcaggaaagaatggactgtgtttgagacaccgaaaggaggttgtgtgaccaaagcagaaaggtggaggggtaagaggtgccacactgtacatctcctcctgccaccctttcctcagccacctgactgtggggccagagggtgctctagggagaaaggaggagggtgatcacactgtcccctcggctcaggccccagaactcactgcagaaggctgcacaggtgcgctggctctgatggttgcaaatggttttgcaggacatgcaggtacccagcagaggatcccagtactgctcttcggggcaggatctcatagccacccccgtccacaggccctgtggaactgagagaccaggagagtgagggcagctggcaggcggccacagcccggcctcttgtccctgatgggaaccaagacggcctctcctgcccacattcgcacagacaacctttctgtctgaggagcagagagggcagacaaagttggcttctagcccccactgcacttgctaggggcctggggcagccacctcccctctccagcctcagtttccccatctgcacatggttgttttcaggccccctgctctctcacatcagcagtgccctactgggccctgttccctgccctccttaacgtgccacgcctctccctgccacagggtctttgcacctgctgttccctcacatgacgtgcccttctccccagcccctgcccctcagctgtttattccttctcagactgagacctctgtctaaacctgatctccaagggaagcctttctgactcaccccctagactaggacacggtccttcttctacacactcgcactgccctttacctgttgctgtggtcactttccttctatgcatgtggttatttgatgctggctcctacactaactgtgagcaccatctggcagggactgtgcctaatttttcttattaattgctgagtcctcagaacctagatagtacttaggacacagcacctgctcattaagtgaatggtttctttaagtacggaccaactcagtgcctagcacacagcaagaaccaagaatgtcaatttccttcttgttttcttttttactaaagtatgaaacaaccacaatgatgtgtgtaaagtgcacaaaaagctgaagaatacagcttggtgaaatttgatgtatgtatgcacctgtgtcattacagcccacatggagatgtaggacatttcctcacccctgaagcctccctggggtcccccgacacccaatgcccatgcctagagggagctactgttctgttgttaccctcataggctaatattgccccttctggtacttccgtgtctggttttgttcctccacttggtgcctgagactcatccatgtgggcgctctctgcatgtctggttttgtgttactgtgaatcttccactgtgtgcatgcatcaccttctccatcctcttctgatttcatgacatttgcttcccccaataacttctccttaaaaatgcttaaaagcattttgcaaggcatatgtttgttcttttttttttcttagatggagtctttctctgttgcccaggctggagtgcagtgggtgtgatcttggctcacagcaacctccacctcccgggttcaagcagttctcctgcagcctcccaagtagctgggattacaagtgcatgctaccatgtctggctaatttttgtatttttagtagagagcgggtttcactatgttggccagtctggtctcaaactcctgacctcgtgatccgcccgagtcggcctcccaaagtgctgggattataggcatgagccaccacgcccagtggcatgtgtttgttctttaacgaaagcaagctgagggaagaccagaggtggctgggcaccatggctcatgcctgtaatccgagcattttgggaggtagaggtgggaggatttcttgaggccaggagttcaagatcagcctgagaaacatagtgagatcctgtctctacaaaaggatttttaaaattagccacgtgctgtagtcccagctattcaggaggctgagacaggaggatcgcttgagcctgagagttcaaggctgaggtgagctatgaccacatcactgcactccagcctggataacagagtgagacccagtctctaaaaaaggaaaagaaaaaagaccaggggcctctcatttaacacggcagcttaaacacaggggtttatcttccttccctcctgaaaccatgcaaagctgacagtcaagtccatctatcttcagagatcaagggaatggcagaggtttctacagcaaagaacacatgtctctaacattctgggagatggaggaaccagagtgcctgactgcctttgagaatctctcatcattgatgcctacatgggaaggaagttgttctgagtcacagaactcaaggaagtctccagatttggaggcaccacgtatctctgacggcagggctgggcagaaggggtgaagctctgtaagaggattggttggaaacttacataaagagggtgtgaccccagcacatccccattccaaggcaggtgccagtccctcacccacccaggcataagagtggggtctccttggacacagctgagggtagcaacgtggtccttcctggcaacaggggaattgtgataatcttcctcctggacagccagtctcccctctccttacccaccccagtttctatctaaggagtgtggcaaccaggtttttaaagatgcctccctccctaccctgcaactggcaggaaatcagaagtctctgctctgggaaaacagacccaaaggaaaagacccagaggcactgacagcgggagattctctccagaaaatgtccaagtccctgcctgatcccactggggcaaagcttctacgtcagtgagcccaactgcttacccagaacttccaggcagctgtcagtgcctcagtctgacttgtgaaccaatggccaagggtcacctgatatgggagcactgcctctagcaggaaagcaaactcaaaccaaacagaaggcagacacctggtgccaacgaagacacgcgggaaacagaagagcattttaaaacaagagcagcaacagttgagatccccagaaatataagagaggattgtgtatctaagaaacaaaacagcagactattgtaaaggacgttcgtagaacaaatgagaattgttagaattataatttatagccagaataaaaacatcagtagaagggctggaagatgtaatcgaataaattgtctagaaaataagagacaaaagataggagattatggaatcatttcaggagctccgaaggttgactaatgattggaaggacattggctccagactgaaggagtcaatcaagtatcagtgcaatacagtctcacaaactagggtacatcatcatatttacgaagtcaagacatctcaaaagcaatcctgggatgtgaggagtgacatggaggaaagcagtaaagtggcaagctctgggaatctgtgcctcctgctaaatgactacggagctgccagccactgtctgaagtcactatttgggaactgtggagttgtccaggggagagcttgatggtaaattttaggaatttcagcctatcacatggtagtggctacttactattccatggcagtgccacttggctagagccaggataagcaagaaggacccttgtccgccaaatattgaggttgtgggttctgattgctgatggctacctgtgaccactgaggggccggcacaaaggacattgtttcaaccctcaagggctgaagtggcttccacgggatttaaagagacagtatccttctctggtctgggagccaagcacttaaggaaatctttgttgggtcactggttgactgcagagataaaagaacagaaacttcagtgactacacacaacaaggaatacatactgtgcaaaaatacaaattaaatttggaaaaatacatagcttaaaactaaaagcttggaaaagtcacaaacagatggcttcagcccttaacaggcaagtttcagcaatccttgaggagtggtaaggttagatttccagtcaccacaacgtaacactcaaaatgtccaggtctcaaaaaaatattacaaagcatacaaagcagcagttttgccacatttacaggaaatacagactatgacagaaaccatttccagggacgtctatatattgggattactagtcaaaggtgtgaaatcaagatttgtgttaggcatgttcaatgagcttaaggaaaccgacagagaactaaaggaagtcaggaaaatgttgtgtgaacacaatgagcacatggtaaagagaaagaagtggtaaaaaaaggaaccaaaacttggaagcaaccaaaatgtccttcagtaggtaaatgtataaataaagtgtggtatattcaaacaatggactgttattcaatactgaaaaatgagccatcaaggcattaacagacatgcagtaacctcaaatgcatattactaagtgagagaaacaaagctaaaaagtctactgtatgatttcaactccatgacattctggaaaagtcaaaaactatggagacaatacaaaaatcagtgattcccaggggttggaggatgggagggatgagtaggtggagcacagaggatttttagggcagtgaagctactctgcaagatactccgatggtggacacatgtccgcatacatttgttcaaagccatgtacaacactgagagtgaaccctaatgtaaacgtcggactttaaatgataacgacgtgtcagtgtaggttcactgattgtaacaaatgcaccatctggtttaggatgttgctagttgaggaggctgtgcggggggatgtggacagggatgtgggaactctctgtacttttgctgaatttttctgtgagcctaaaaatgctctaaaagtagtcttttttttttttttaaagaaccatacagaagttctggaatgaaaaagttcaaaaagtgaaatacgaaccttaatggaagggaactatcgcaaatttaagcaagcagaagaggcaattggcaaacttaaaacaattgaaataatagtctgtgtagcaaaaatgaaaaaagattgaggaaaattgaacagagccaaatgtactaatgtatgctcatagaagttacagaaggagaagggacaaaatggcagaaaaagtatttgaaggaataatggccccaaatttcccaaatctgagaagacgtgaatatactcattcaggagtctcaataaatttgatgcaggaaaacctcaaagaagcccacaccaggacatattacaataaaatcaaggaaacccaaggccagagagaattgtgaaagcagcaagagagaagcaacttcttgtgtacaaaggatcatcaatacggtaacagctgatttctcctaagaaaccatggcagccagaaggtagtgaaatgatatatttaaagtcctcaaagaaaacagtaagctgtcaaccaggaattgtatataattttaaatcacctttcaataatgaaggagaaattatgacttttccagataaacaaaatctgagcagtgcattatcagtaaacttgccctacaagaaatcctaaagtgagtctttcatgctgaaataaaagtactctagacggtaccttgaagacataagaaaaagtgaagtaaatataaaggtaactaaataagtaactataaaagccagaattattttacattttgcatggtttgtaactcctattttttttctatatgatttaataggcaatgagttaaacagtgattgcaaacctatgttagtggtcatagagtgtacaaagatgcagtatgtgataatcacaatataaagggaaaggcagggacatacaggagcaaagctcttatgacctaccgaaactaagttgatattattcaaactaggacgtcataagtttaagatattaattgtaatccccaagaaaataactaaaatatgtatagaaaaagaaagaaaaagggactcaaagtggcccactacaaaaaaaatgaacaaaatacaaaaatgaagtaattgaagaaacaaaaacatgtaagacatacataaaacaaatatataaatggctgaagtaaatctttatcagtgatcatattaaatgtaaatgaactaaactctgctagtaaaaaaaaaaattggcagattggatttaaaaacccacaggcttcatgtatattcagtgtataagagacttactttagattaaaaaaaaatacaaagccagaattattttactttttgcgtggtttgtaactccaattttttcctatatgatttaataggcaatgagtaaaatagtggtaaaatagaagttgaaagtaaaagaatggaaaaggtattttatgcaaatagaaagcaaaagagagctggggcagctatactgttgtcagacaaagcagactttaaatcacaaaaaaattacaaaagacaaagaaggacaatatatattaataaaggggatacagcataaagatgtaacaattataaatgtatacacacctaatgacagggttccaaaatatatgaaacaaaaattgacagagttgaagggagtaatagatagtcctacactaatattgggatatttcagtacctcactttcaataataagacagaactaccagacacataaataagaaaatagaggacatcaagaacactataaaccaattagacatcacagacatatagacaacgctcaatgcaacaacagcagaatacacattcttttcaagtgcacatggaacattctccaggatagaccttatgttcagccacaaaacaaggctaaactttaaaattttttaattttttaaaattaaaattattcaaagtttcttttctgatcatagtggtataaaactacagatcaataacagaaggaaaattggaaaattcacaaatatgtgtaaattaaacaacacgctcttcaacaacaaattggtcgaagaagaaatgacaggggaaattataaaatatcttgagacaaatgaaaatgaaaatacaacataccaaaagttatgaaatacaacaaaagcaatgcaaagagggaaattcatgtaaatacatacactgaaaaagaagaatcataacctgatcataactaaatcataacctaattatataccttgaggaaataaaaatagaacaaaccaaatccaaaaatagcagaaggaaagaaataatgaatactagagcagagatcaataacacagagaatgaaaaaacaatagagaaaatcaacaaaaccaaaagctcctctttgaaaagatcaacaaaattgacaaacctttaggtagactgactatgaaaaagagagatgactcatattattaaaatcagaaatgacattaagaactttattacttattttacagaaataaaaaggattataaaagaatactataaacaatggtacaccaacaaattggataacctagataaaaatggacatattcttagaaatacacaatctaccaaaactgatgaatgaacagaaaatttgaatactcctataacgagattgaatcagtaatcagaaacctaccagtgacaagctcaggacaagactgctttactagtgaattctaccaaaacatttaaaaaagaatgaacaccaattcttctgaaactcttcccaaaaaccaaagagaaaagaacacttcctaactcattcatgaagtcagcattacactaatacaaaattacaataaagatgtcacaaggagagaaaattacacacgaatatgtcttatgtatacaaattgaacccaatggcacatgaaaagtttattcaccataaccaagtgggatttatttttggagtgcaatggtagttccacactaaaggaatgaataataaaacttagtggtcttctcaattgatgcagaaaaagcacttgactaaatccaactttttttaatgataaaaacacttgagaagctaggaatagaaagtaactttcctatcatgataaaggccatatttgagatcccacattctcaatggtgaaagtgaaagctttgccctaagatcagaacaaggccaggatacacacatttgccacttcttttcaacatagcaccaggagaactagccagagcacttagacaagaaaaagaaatagaagtatccacagtggaaaggagagcataagattatctctgttcacagataacccgatcttatatgtagaaaaccctaacaattccattcaatggggaaaaggacagtctcttccataaatgatgctgaaaaaattggatattcacatgcaagagaatgaaattgaatgcttacctaatgccacatacaaaaattaactcaaaatggactaagtgctaaaactataaaacttttggaagaaaacataggggaaaatctccatgcactaaatttgacaatgatatcttggatacagcaccaaaggcataggcaatgaaaggaaaaaattagataaattggacttcatcaaaatttaaaacttttgtgcaccaaaggacactattgagagagtgaaaagacaactcacagaatgggagaaaatatcttcaaatcatatacctaatatggggttaatatccagaatatataaagaactcctaaaactcaacaacaaaaaaccaaacaactcaagtcaaaactgagcaaaaggcttgaatcagcatttctccaaataaaacattcaagtggtcaacaagcacaagaaaagatgctcaacatcattagtcattagggaaatgcaaattaaaaccacaatgagatatcatttcacacccattaggatggctattattaaaaatggaaaataagcagcgttagagatctgaagcaagtggatgtgaaggcactgctcatgggaatgtataacagagcaacagctgtggaaaagtctggcagatcctcaaaaagacaaacataaaactaccacaagacccagtaattccactcctaagcaaacatccaaaagaactgaaacagggatgtgaacagatacttgtgccccaacattcagaacagcatattcacaacagccaaaggtggaaacagcccaatcgtttatcagcacatgaatggacaaagaaaatatgttacaggtacacaggatactatgatgttattaaaatgaatggaatacttatacatgctacaatgtggataaactttgaagatattatgctaagtgaaataagacagtcatagagagacaaatattgtacaatttcccttacctgagggaagtagaagaggcaaattcacagagttagagagtaaaatagaggttagcacaggcagccgttattgattaatggggtacagaatttctttctggggccataaaaaagttttggatatagatagtggtgcttgtgcatgtacgtaatgccacttcattgaatatgtcatgatgattaaaatgataaaagtttcattatatatattttaccagcaaaaagtggaagtagaaagcagaaagtaagcagaaaatggagcaatgccttaaagtttaggatagaaagttattttcagtctagaacattgttatctatcaagtgcgaggtagaataaagacgttctcagacatgcaagatcttggaagctactggagggcttgctccactgaatctggggagtggccaaaaaaaccacgggtagaacaggacccctgtcagcagagaggaagatggacattctcagcatgatggtgaaggacttccccagtgacagctgcttgaaggtctagagggtactctatcccagctaaaatggaagaagggtaaatgtcaccagtgaaaatacagaagtgataagtgaggatgtctgaccaactgacagggtggatttgtcccagagctggagatgaattacctgcatggaaaacagaggagttaccaactccagggaaacaaaagacattactgagaaaagaaaggtaggccaggtgtggtggctcatgcctgttctccaatcactttgggagaccaaggcaggtggatcatttgaggtcaggagttcgagaccagcctggccaatatggtgaaaccctgtcttcactgaaaatacaaaaattagctgggtgtggtggtgcatgcctgtaatctcagctacttgagaagctgaggcaggagaatcacttgaaaccaggagacagaggttgcagcgagctaagattgtgccactgcactccagcctgggccacagagtgagactcggtctccccccccaaaaaaaaagaaagaaaaaaaaaagaaaggaaaagaaaggtaatcataggacatgtacagcagctcagctgtgggcaatatttatattgtcataaataaatgagccatctgagtcaacaaataaggtggagatgtggaattattccttctgtaaaagagtttactcactgtgagagccattagaccattgtcagtgagcaaaggcaaaaacaggctttctaggagagagcaaggagaaggggaagaacaaaactgcagaggagttgacattctggagcagagccggcagccagcaggtctatcttgactccaactgaaaacgcacccctccttcaccgggggccgggggaggggaagctgcatgcatgcagatagtgacgtccaagttaagttctcaccttagaaagtggggaatcaatccagagcgtctaaaatggacaagtcaaggaccagcagggggagtggaccagattctgagccactttggggatgagcctggggaaagccacagggcagccctgcttggaaccctgggctgtgagtcatggggctggtactccttgctgtgtgaccttgggcacgacttctgctcttggacacccagcgtcctcccctgtaagatgaggatgctgttgcttactcacagaatcactgtgagcagcatatgcatggcaggtgcctagtatggtattgagcacgttagtaaagacaaccccctgagctgctgcccttattaatattgccatttcttatgataaggagtgctgtgctggacaaggcctacacctggatcgagacaacaaaaattttaggggccaattcctgttggcgtgagccaactccctcttttcctccttggtggggaggtgtctgtgcaggagtgaaggagcagggttggggcgatgggtgggctcctcattcttgccctttacaatttcaccaagaaaacctgtagatgtgactgaaagagaaggaacagtaaaagcttggcagataggaggaatttcttatcaagttttgtttttgtttttgtttttgtttttttggttttttcgagacggagtctggcactgccacccaggctggagtgcagtggcaccatctcggctcactgcaagctccacctcctgggttcacgtcattctcctgcctcagcctccagagtagctggcactacaggtgcccaccaccacgcctggctaatttttttgtatttttagtagagacagggtttcaccgtgttagccaggatggtctcgatctcctgacctcctgatccacccgcctcggcctcccaaagtgctgggattacaggcgtgagccacagagcccggcctttctcatccagtctttcaagcaaacactgactgcaaacttgggctgggggctatgagttgagctcaccagtggggtaggggcaggagaggattccagcgtgcagagatagggtgtgtgccccgataaggctgcagcctgagacctgagggatgtgcatgggaatggatggtgaccttacaacctggcttctgctaactgggaaggagaaggaggaagaaatggaggaggaaaagaaggatgaggaagaggaggcagaagaggagaagaagggaaaaagaagagagatgaggaagacagggaagagaaggagagaaggaaggaggaggaggaaaagatggcttttggtttctgtgagctgtatatgctttttccccgggctattttgaaatactgaaaatggctctaagacccccctgcctgctcccacctccactcagaatgaaccttcagagatgttcaaggttgagagtccaccatctccatgccttttttttttttttttttttttgagatggagtttcactcttgttccccaggctggagtgcagtggtgagatctcggctcactgcaacctctgccttccgagttcaagcaattcttctgcctcagcctcccaagtagctgggattacaggtgtgtgcccctacacccggctaatttttgtatttttagtagatgaggtttctccatgttggtcaggctgatctcgaacccctgacctcaggtgatctgcctgcctcagcctcccaaagtgctgggattacaggcgtgagccaccacgcccggcctcccatgctggttctaaaggaagaagaacttagttaggtcctgggaaaactggtcaagtcaccttctcagttttctgtttgtgaaatggggacagccacttctacccatcataattttcacctcctgccagctcatgttgaaaacggattcgccatggttcagtgacccagagtgtgccggagtgaagtgcccgtggtggggaaagcacggctgagtcatcttgggaaggactctggctgtgcacaacctcagttttcctgacctgtaaaatggacactctagactttcttttgtagatcttctcaagggtgtgtacatgacaagcatgtaactggcccaagacatggctgctgctactggtataataactaccagtagtgatataaatagtatgaaatataatgggttaatagttatcattttataataatttataataatgtaaaataattttaatattagtgataattaacattttcttttgtagagacagggtcttgctctgtctctacaaaattacagtggtgcaatcatagctcactgcagccttgaactcctgggttcaagtgattctttcccctcagcttcccaattagctaagacaacagctgtgagcccctgtgcccagccaatgataatcattaataatgatagtagcatcaaattagtgctctgggctgggggaactacccccagaacctgaactcccagaacccactgctgggtgacatttcttgttggtaatgtgacatttcagggtatagccattctgcctccccgtactgtctcatttgtctctgaatccagtgccttccaagatagcaggcacacagcaggtgctggataaatgctaatcagtagctggatatagttgtactcagtaaagacttgcggaaggaaaagcaagccgcattcttgcactgtgctgatagacagctgggcagggatcatactgagtttcagcagcagctccctccctgcctgcatctcctccatccagggaggatgcagggagaggtggcctggtggggaaaggtgaaagtcctgggtgttgctttcaacacttgggagagaggattcttggcacaaagtgactgggccagaaacgagcacaggaaataatttccctcagatcgaaaagcaacccgctaaaatatttaaatgtgaaaagaataaaaacatgtaaatttaatagagaagaaaccatttcataatttttttacatcatcaaagtgtgaaaggtctttctaactatgacccaaaatctctaaaagaaaagacgcataacatagaatccacaaaacaacaggcaaacaaaaaaacttttttatggctggatgcggcggctcatgcttgtaatcccagcactttggagcccgaggtgggtggatcacctgaggtcaggagttcgagatcagtttgaccaatatgaggaaaccttgtctttactagaaatacaaaaattagctgggcatggtggtgtgcgcctgtaatcccagctactcaggaggctgaggcaggagaatctctcgaacccagttgggggaagttgcagtgagccgagattgcaccactgcactccagcctacgcaacagagtgagactccatctcaaaaaaaaaaacaccaaaaaaacaaaaacaaaaaacgacaacaacaaaaaccccaaaacttctctatgacaacaaacacccaattccaaagacatatgaaaaacaggcacaaaacctttgcaactcagatctaaagaataagcagaaaaataaagagctacccatgagaaaaatgggcaaaggtcatgaatagacagttcacagtcagggaaatacaacataaggatgcttggtctcattcaaaagagacaggcaaattcaaactacactgataccatattcatgctgagattgttaaaactccaaaagtttagtaaaaccttctattggcagagcctgtggggagagtggcattcttattcattgtggaaggagagtaaatagaaataacccccatggagggtaatttggcaacatttgtcaaaattactgatggatttacccactgacccagtgattaaactttgaaatttatcccgaagtgtgaaatgataaatttattacagcaacatttttttttttagtatatgtgctgccgaagtgagcacaacatttggttttttttgttttttctttttcttttttctttttttttttttttttgagatggagtctcactctgtctcccaggctggagtgcagtggtgcgatctcggctcactgaaacttctgcctcctgggttcaagcgattctcttgcctcagccttccgagtagctgggattacaggcactcgccagcatgcctggctaatttttgtatttttagtagagatggggtttcaccatgttggccaggctgatctggaactcctgacttcaggttatctgcccacctcagactttcaaagtgctgggattacaggtgtgagccaccacgcctggccaattgcagcaacatttgtaatagcagaagattaaaagtaacccaacatccatcagcagggaattgactgagtaaattacagtacatttatacactagattgttctgtagctatcaacaaaagtaatgaggaagctctctgtatgttgctgtggaaagaacagcaaggcatattaactaaaaaacaaaaataaaaacaaaacaaggtatataacggcatggctcataggccctgtttttgttttggaggttatttttgaaaaaagggggaaattctaatcatatttgtaaatggtcatgtatacattaaaaaattgtgttaaaaataagaaaccaggccgggcgcagtggctcacacctgtaatcccagcactttgggaggccgaggctggcggatcacgaggtcaggctaacctgacctaacatagtgaaaccccgtctctactaaaaatatataaaaaaaaaattagccgggcatggtggtgggtgcctgtagtcccagctattcaggaggctgaggcaggagaatggcgtgaacccaggaggcggggcttgcagtgagtggggatcacgccactgcactccagcctgggcgacagagtgagactccgtctcaaaaaaaaaaaaaaaaaaaaagaaagaaagaaaaaaaaaagaaaccaaacacactattttaaggaaaatatttaagaaaaaatttaataaaagaaatgcaagaaggccaggcatggtggctcacgcctgtaatcccagcactttgggatgccgaggtgggtggatcacgagatcaggagattgagaccatcctggctaacacggtgaaaccgcatctctactaaaaaaaaatacaaaaaattagccgggtgtggtggcggatgcctgtagttccagctactcgggatgctgaggcaggaaaatggcatgaacccgggaggcggagctcgcagtgagccgagatcgcaccactgcactccagcctgggcgacaagagcgaaaccctgtctcaaaaaaaaaaaaaaagaaaaaagaaaggaaaagaaatgcaagacatacatgaaaactaaaaaacattgctgaaggaaattaaggatttaaataaatggaaagccatcccatgctcatggattgaaagaaaacaaagcatagttggaagactcatgtttccctacttcaaaacttattgcaaggcaatgctaattaagatagggtggtactggcatcagacaggcataaatcaacagaatataattgagagcccaaaaataaagcctaacagttatgatcaatggattttcaacaaggatacccagactattcaatgggagaaagaatagtgttttcaaaaatgatgctgggtcaactgggtattcacatacaaaagaatgaatttggaccattatctcacaccacacacaaacattaactcaaagtagatcatagacttacatgtaagagctaaaaccacagaactcatagaagaaaacatagaagtaaatcttcatgatttgaggctaggcagtgacaccaaatgtgcgtgtgatagaagagaagattgatcaaaattggacttaatcaaatgaaaaacttttgtgttccaaagcaaatcatgaagaaagtaaaaagacaattcactaacttggagaaaataggttcaaatattatacctgaaaaggagcttgtatccaaaatatataaagaatgcttataacagaataatgaaaaggcaacccaatttttatatgggctaaatatttcaataggcattttccccaaaaaaaccatataaatggctaaagaagcacatgaaaagatgcttaacatcatttgtcactagggaaatgcaaatccaaaccacagtgagataccacctcacaccccttgggatggctagaatgagaaagacagtcaatgacaaatgtcggtgaagatgtggagaaattggaaccctcatgcatgaagtgaattataaaatagtgcagctgctttggaaagcattttgcagttccttaaaatgttaaacatagaatttatcatatgacccagcaattccacttgtaggtatctatctacttaagagaaatgaagacatgttcacccaaaacttgaatccaaaagttcatagaagctttcttaataatcacagtgacaaaaaaagtagaaacaacccaaatgtccatccaccgatgactggaaaagccacatgacatatccataaagtggaatgttacttggccacaaaactgaagcaagtactgatacctgctacaacatggacggcccttgaaaacattatgccaagtggaagcagctagtcacaatacatcacatatgattccatttatggaaaatgtccaaaacaggcaaatctatagagacagagagtagattagcctggggctagggaggaatgaagactgacaaagtttctttttggggtcatcaaaatcttccaaaattagcttatggtgatggttgcacaactctgtaaatatactaaaaacacagacttgtatgctttacacaggtgaatttcatggcatgtaagttatatgtaaataaagctgcttattctaggggaggtgggaactgggcagatggaggacaaggaggaagaaaagactttctattatatatctttcaatactttctgggtttcaaaccatctgactatactatctattcaaaggcaaatctaaaatcaaaggatcaaacaaaattaaaggcagacccgattctccccacttttgggttggggagcaaagagggagaaagccaccacccgccgcatatcaccgtgaagggttggttgagtggaaggtgggcaggacgttctatgtgacaagggcagccttggagatgttccaagacccattcattgcctggaccaaagccaccaaaagccactggacctgacagagagacagtgcctgactgaccagacagcagatgccaagctgaccagagggcctgtccccgccccctcctctaccaccatgtggacctacataaaatcccagaaccatcatcaagtgccaaaggagggcaggaaaaccccatgactgacaccagccaggcagaatagaagcttgagagagaagcttcgttgatggaaagggaagaaagggaacacctctctgacactagctgtgtgggctgggctcagactctgggccgccacaaatttggatgcaggatggagactctctcctgcaccccgagaccagagagcagccaaggagggtgattctcagagccctctgcttgtgcctcctcacgggcttggccggttaacaggtgctgcaccaagaaagagctctgtggtcggattagtttgaaaaacactgggttaaagaaagtcaaggcagttttttaaccgcagggcttctcagagcctttcctcatgactccccaagagggggtctggtagtttcatcaaagcacttttgtgtgtttgagggatgtctggtaggaaagacagtcttcttcattttacactgaggggaagcggctcagccaaggtcccagagtgggccagtggacaaccggccagggctgattcggcagcaccagacagcttctgccactgccaggtcacagttctagctgggtcctgactcgtggccccagagcactgggcaatttcatcctgtgttaaggcagcctctggtcactgccttgtccaagtctctcagaaactttacatatttgagcccctggctgtgtagattctggggacttggtggctggacacaaaaaaggactgaagaacaaatttgctccctgcctgaggtgtgggacagagcagcaggcagaggctgtgaatctaggctgtgccccgggtccatctggccatgggttctgtctgcactaaaggacctggggccctttcataaaaccttagaaacccaccctgatgaaaatgctatacgggccgggtgccgtggctcatgcctgtaatcccaatactttgggaggctgaggcaggtggatcacctgaggtcaggagtttgagatcagcctggccaacgtggcgaaagcctatctctactaaaaatacaaaaaattagccgggcgtggtggtgggcacctataatctcagccactcgggaggctgaggcaggagaatggcttgaacccgggaggcggaggttgcagaaagccgagatcatgccattgcactccaacctgggtgacagagcaagactctgtctcaaaaaacaaaaacaaaaacaaaacaacaaaacaaaaaaaaagaaagctataggataaatataaatataaatatataacagaaaaaatgggtggaaactgttatagattaaaacatagccaaaagtctaatgtgggacaggctgatttgaacaagtcaactgagaaagacattggtgagacagttggtacagtttgaaccctggcgggctatgtgatgatgttcaggaattgttgtttcagcaggggtgaaggtatgatgcttagttttttgttttgtttttagggtttgtgttcttaaggaataaatcctgtggtctccacaactcaaacaatctggtatttgagattagcattaaaatggtccagcgggcatgtaagggggaaaatgggggctgtgcaggggccatggtgacaaagggaattcctgccggtgtggccaaccctgcaacctcagtggcttctgtcacggaaggcaagccccacatcccagaggcatccagactcggggctctccatgtgcaggagcttggggaggctgggactgccccagtgtgtggatctgctgtgggctttgcacctgctggaccttgcaacccccacggcactcaggcccaaccctcctcacacctcccacctgccctcctgccctcctgcccggctactcacagcgctcctcctggtccacacggctccggccacctcgcctgctccggcccaggccactcattactcaggatgcttattactagtcttagatttgattagtgcttgggctgcacttcctgggttttcccctcaacctgttggatgtaaatcagccacacccactcccgcccccatgcctgtgcattgggtctcaggagcccaggtgggtggctgcggcccaggctcctggcgtcccatggggtacacacagagcagtggaaggcctgccgggccttgcgatgaggtattgactatgggatggcccaggctcttctagatctggccttggccatcccttggtcctcatctcctgcccgccggcacacaccccaagccaggccagctctccaccctcccagcatcactcaggcctttccctcttcctgggtatacttattctattcattgcctggtcggctcctcctgctcttccttcaaggctccattgaggtgtcacctcctccaggaagccatccctgactgtcccagcctgtcaggtggtactcattctctgtatctccttgaccctctccaacacctagcagagcactggagaggctgaaccccaggaccggacagcctgcgtttgaatcttgactctgctgcatactagcagaaggccttggtggcaatttatggaactcttctgtgcctccatgttctctgtgtaaaacaaggatgaggtcgggcatggtggctcacgcctgtaatcctagcactttgggaggccgaggcaggtggattgtctgagctcaggagttcgagaccatcctgggcaacacggtgaaaccccatctctactaaaaaaaaatacaaaaaattagccgggtgtggtggcgcgtgcctgtagtcccatctatttgggaggctgtggcaggagaatgaacctgggagtcagaggttgtagtgagccgagatcgtgccattgcactccagcctgggcaacagagatgccatctcaaaaaaaaaaaaaaaaaaaaggatgagaacattgcccgcctcacaggcggttatgagcatgaaatgagggagggagcacagttacattcttagagcaggttcttggcacacagtaagtcctcaataaaggccgtggaggaggaacattacagcccgtattgcactgcatggcgactgcactcctgtgtcttccccatcgtctgaaacctcccaggggatgggaggcccagcaacagccaaaggcggagtgagaggaacgtaaaagccaaagaaagcccatgggcccttaggaagaaactgaaggacgaggaggacatggagaggtggagaggaaggagggaggctgcaggaagcagctggagcagggtgatggtgcacagagcaggagaggagatgcagacggtcagcaaacacaggaaaatgtccagtctcccaaaaatcagaaaaacaactgaacaatgaaaaactaactttcagccatcaggttgcaaagttttaaagttggtaacatcaagggcaggggggtgatctacagaagcatgaactcagggcccactggagggagggagctggcagcagcgttctggagagtaaccagccagggtcagttaaatgcacaacacacacctaacccaccccccagaaattctcctcctccgtgagcctcctcatgacagcgagaaacgggaaacaatgtaaatgtccatgcagcagaggatgcctgaataagcagggtgcacaggccagagccaggaatctattgcacagttaaaagaatgagaaatctcgaagctttcaggacagacgctgagtaaataaaagtagcttatagcatgagccttacagcatgatgccttttagtaaaacaaaaccaaaagcaaacaacatgcacacacacacacacacagtacagcgctgtgttgtctgtgatcacgcacacatgactgtgaagcataagaagtctgcaaagacatgcatgacgaaactggctctcgccgggtggggcaagagggaaccaggactgggggtgaccgtcaaaggggactttagccctatttgtagggctaaacattttacatttagggcttttacatttgtaggggttttacatttaattacttgtttacatttaattacttgtgtcaatgaacagtgacaaaaccatagctgggctctggcagtggatttctaagagagaggtaagaaagagatcccattgccaggaactttctgcctgttgaaatgggcaagcccaaagtcactacaggatgccctcactgagtcccccctcacctcctgtttgcatacccccagggtcagggctctcaccacctcacggagcagctggctccctggggggtagctctgatggttagaaagctcagctctagcctgggcaacatagcgaccctgtctctataatttttttttttttgagaccgagtctcactctgttgcccaggctggagtgtggtggcgtgatctcagctcactacaacctccacctcctgggttcaagcgattctcgtgcctcagcctcctgagtagctgggactagaggagtgagccaccactcccggctaatttttgtatttttattggagacagggtttcaccatgttgtccaggctggtctcgaactcctgacctcaagtgatctacccgtcttggcctcccaaagtgctgggattacaggcgttagccactgcacccagcctaattttttttttaattagctgggtgtggtggtgtgcacccgtagtcctagcaacttgggaggctggaggattgcaacactgggctggagctcaggagttcaaggctacagtgagctatgatcacaccactgcactccagcctgggctacagaatgagaacctgtcgcaaaaaaaggaggaggaggaagaagaaggagaaggagaaagaggagaaggaaggagaagaaggaaagacagcaagttcagctttgtccagtgagcagactgtgcttccagactgtgcttccatgggactgaatgctgctctctgcagccacacacattgtcctggagttttaaagccaatacctgttatgcctgaaatgaaaaacaaacaaaatccagcctgatttggggagtggctgagaattgaatgacagagttccctaatgtcttactgccaatcacagcttgttaatgcttttgctcaaatgcagtttacagagaatggatttaatttgctttctattttctttaattagatggtgtaatttacagacagtgaaatgcacccttttaaaatgggaagttcagtaagtgttctcatacatgcacacccaggcaaccacaactcagatcacaactcagagcatgcacagcccccagaaggtccctcactgccccttccagccagcacaccccactccatccccaagagagtcacaattctgactcctgccaccacagattcattttgcttgttccccaaactttgtataaatggaaacatacaaatgggatcgtttcatgaaacacaaaaatagattccccctctgcactggctcccccagaagattgaacaggtgctggaggtttctaaagctcattctgagaccagcctttttttgagctgtctcccaagaggatgcgggattctaattttaagctccacagccaaggtgacagaagagatttagaacccagagtagagataactcatataccttaaggttttggacctggttcatttatatatgtataattagcgagttaaaatgcacacatagtaaagaaaaaaattcaagcagtaaaagaatatggcggaagtaaatttctctcctgtctggttatcctaggcccatgatgtccctactcaaaggcggcaacccttagtggaccttgttcatacagcctcccagcaaagcctaggcatttctgagcatgtgcgtgtcgctagaggatatatttcacctctccctccccctccataccttttttttttttttttaacacaactgctggcttatacagatcaaggttgctgtttagcatgccaccttttccatttagtatagcctgccggacagttcttagcttttgaaatgaactcctacagtgatcattgggagtaacaacagggaaaacttagggcactgttctaaacacgtaacatctgctcatttaattcacattttaccgtctttgtcaccttgaggggcatgagctccttaagttaaattgtttgaagaaaggcaacactggcctgttgatcaatatttcccagggagatggttccactctgcactagcatgtccgtggtattttggccctaaagacccacatccctgcaggtgctgtggtctctttgagctccctcatgtctgccacctactcctggtcccttgaggccctgctgttgaacctcctctgagacagttctgggtgtaaaacaaaaggaagagtctccaaaagaggacatttcttagacatgcagcgaaagccctcattttcattattgccatttacatagatgactcagatgtgctgaatttcctgttgctaatgtagctgtacatttgtgctaatttctcagaaatgctagataccattattttagcaaaactcactttgaaaaagcaaagagcagggtttaaaataataataataagggtccccagtgttctgtgggaagatctagtttctctactttaaaatgtttccctcctaactttttattatgaaaacttcaaaacttcaagaaagttaaaattataatgaagactcagggaccctccaccaagattcagtagctcttcaccttggtgtctgcatggctccatccatctctgtctcttcctgcctgccttctggctgagaccctgaaggcaatttgcagacatcccgacactgcagtcctaagtgtgtccacaaggcacctcctaagaaaatggacattctctcacatagactgtcatgatcacatctaagaaagtcaatcatagttcaataagaccatctgacatctagtccacatttaaatggccctggtgcttataagacattttccatggctgcatcttttgaatcggtatccctctgggggtcacatattacatccggtcattgtatctgtgtagtccttttttggctagagcagtcccttcccttttgctctttttcttctcttttatctttttttcctttgtttggtgtgtttgacgttgactttgtgaagagacttggccgtggtcttgtgaaatgtcccatggctgatctctcgggctgtatcctcctggtgttggttcacgtgttcctccaacctctgagagctcctggaggtgcatgatgttggctttctccccccacggtgatgctgtcagatcccttgttaagatggtgacaccagctgttcccctgtggaggcacactgtcccttttgcaattagtgtcccttgtgggcaatgccttgtgagcatcctggttcccaacagaaaggacgacccttctgttgatcattttagcatctttggccaaaaccaatattccacttgcaaggtggtaactttcgataccttttagattccttctacattttttagctggtgtttttctgtaaatagagctttcttgttattttcccctttgaaaaaaaatacagaaaataaccatgaaaaatataaccaacatccatattttcaccactgagaatttgtgttaaaattttggcatattcaccttcaagtttttcttataagaaggaaaacatgacagtgaaatctccgaaatcccccaactccctattctacttcctaccctacactcaccatcataaatgtggctctatcttccaggcccctttttatacttttatgagtacagtacagaatgttttagctatgaaaaatacagtatatagcattattttgcgtgttatttttaaacattttatataaatagcattctaaatctatcattatgtccctttcttttctcacccaacacctttgagatcagctcatatggatgctcatataatgagctcattcccgtttagctgctctatgggattccacacattcttttccgttcctcctctactgaagaacacgtggactgtttttgattcctcgctgttaggagccacgctacagtgggcagacctgtgcgtgcctttgtgcagatgtatgagcatctctctgagttgtggccagcttcactagatattgcccaaatgaccacactaattaatattctctcccaccagcagccacatgtggctggctcctccctcatatcttcatccacatgggatagtatcagactattacatttttgccaaactaataggtgagaaatggtatttgttgctttaatttgtatttcccgatttctagcaaggcagtgcacagatgtttctcggccactgtgaaggggtgtttccatgagacacatggggtatgctctgctctgtggatctgagctgctagtgaatcctcggtctctcctctagagagagtgcctcctaggcactaacaatcaggtggctatcacaaagggaatgaaattattctcaattgtcattgtccttatatttgtatgaataatattgcttgtcgcctagtacttatcacccggctttctatgagccaggctttattactttaaccactttacttgatcctctcagaaatttatttatatttacttatgtgtttattttgagatagggtctcactctgccacccaggctggagagcactggcacaatcacagctcactgcagcctcaacctcctgggctcaaacaatcctcccacctcagccttctgagtagctgggatgacaggtgcgaaccaccatgcctgcctaacttttaaattattttttagtaaagacacagtctcaattgttgctgaggctaatttcgaactcctgtgctcaagtgatcctcccagctcggcctcccaaagtgctgggattacattcgtgagccaccatgccaggcctaggaatagatttattatttccattttgctgaaaaggagacagagggtcagagtggaacagtgacttgcctaaggtcatagagctggtaagcgatctgcttccagagcccaaacccttccctctgtatagtattgctccttcacactcctcccagatgcccagatagttcccagcaagaataaaagatggtttcacactgaaagaagaagattggttctggttttcttgtctccttccctggttcccatggctatgagcagagaagttgttcgttaaccaaaaattacagccttgcaaatagctcctagcccatttgcccaggtttctgggtagaagacaagcagagcaggcagttatagtacagccggcccttcatagctgcagtttctgcctccacagattcaactaaccactaaccacaagtagaaaatagaaataatggccaggcacagtggctcatgcctgtaaactcagcactttgggaggctgaggcgggtggactgcttgaggtcaggagttcaagaccagcctggtcaacatggtgaaaccctttctctactaaaaatacaaaaattagccagatgtggtggcagacgcctataatctcagctacttgggaggctgagtcacgagaactgcttgaacccaggaggcagaggttgcagtgagcagagattacgtcattgcaccccagcctgggtgacagagcaagactccatctcaaaaaaaaaaaaaaatagataaaaaatagaaaataatgcaaatgaaaacaatatagtataaccatttatatagcatttacattgtattaggtgttataagtaatctagagattatttaaactctatgggaggatgtgcatagcttatatgcaaatactacacattttatatcagagacttgagcatctgcatatttcggtattcttaaggacctggaccagatcgcctgtggatactgagggacaactgtgcttctttctcactccaggtcagaaaggaagggtgggttggtaaactcttaatctgttcaagtttttggattggttgtagccagggtgggtgatctgggtgggcaatggagccacagaactgaacgttcaagaaacttttagatcctaagttgggaaaaaggaatctctctctctcactcgttttagttaaagtcctctgttgtacatgtggtattgggcagagatacgtacaggcttctgcagcgtcatcagaactccagaggagaggtggcttccaggcgggtgagccttcaggacttcaggtccagtctgcccatttataaataggaaagcagaggcattgaaacctctaggtcctaggctgcttgaaggcatcaaagtgcctgactggtcctcggagcctggcaaagtattcagcttacaacatacatttcatgaatatttgttgaatgaataaataaacggacaagaaggccagacgtggtggctcacgcctgtaatcccagcactttgggaggccgaggcgcgcggatcacttgaggtcaggagttcgagacgagcctggccagcatagtgaaaccccgtctctactaaagatacaaaaattagctgagcttggtggcaggcacctgtagtcccagctactcgggaggctgaggcgggagaattgcttgaacctgggaggcggaggttgccgtgacatgagatcataccgttgcactccagcctgggcgacaagagcgaaatctgtctcaaaaaaataaaaaataaaaaggtaaatggacaagaaagttggaatcttaaaacaaatgcacaaaacccccaagcttttgattcctttgggttctgctgggtggaggggacctatttgaggaaggagaatcaatgaaccgggtccttcgtgagaagatgtggccaggtcctgccgtgaggccctgggtgactcagtgagcactccctgtccacagctcagcgactcacagatgtccccagggagaagtacagaagctgagagtctggacgaggccccaggctgcctggcccctgccttcctgctctcctctcccacctctcccgcttaactccgctgcagccacagccgtcttggtcttcagacaagccaggcccattctccgctcggccgccttgcccctgctgctgccctgccaggagtgctcagcctgtggctctctgaaggactgagtcctggttccaacagcacctcctcaaagaggacttcctagataccctggccagagtccccaccctggccactccctaccactcccatctggtttatttcctgagcacttgctcctgcttggactgacctggcacgtccctgtgctcgctggtgggctatctgcttccctcatccgaaagtgactatgcctccggcatctgaggctgcacctggcatgtggcaggcactcaacagacagatggtgcaagaacgagagaaaaagaggccggggctgagcgtcatgctgacgcctctggaaacctttatctctgagcagtggggagccccagctggaaaaggccgcacggctcatggtgaaggtgacgacgatgatgcatgtgtgtgcacggcaggtgttaggctgacaataagtggccacagttagctgaacatctactatgtgccagatatgaacttgatttttaaatcactctatcctcagaataaggcaaatgctgccacgacccccttctcacagacgagagagtcaaagcccagagagactgagctttttgcatccagtctgggatgtggggagctgagatgtgctcccacaaatacctgaccccaaagcccaggctctttctagtgggcaatgaacagctgaggctgttaccaactttcttcaggccctgaatggcagcccaacttcccgctgaccctgttgttcttctttctgcccagggactccctaccctctcagagcagaagacaggcccagaaacagaatgtccactcactcagtccataaacatttattaagcacctacaacgtgcaggggtgcggggatgcagcagggcttaagtcaaagctcaagcactggtggagctcacaggtggagctgctgagggcataacaaagaagtaggcaaaggagtgggcagcagatactggtctgaactgggacagtcaggggacaggaccaggagagctggggctggggacctgggtcgggggagtcaggcagcctctctgcggaggagaagccagcttgcagcaacccgggtgaggggctgcccagcagtcagtgcacttaggagagagtggacttagtacactagtggagaagaaatgaaggccagtgtggtgggggtggggaacaaggtggaaacagttactgagctaatgaaatatcatctcgggctcccccacatgtaatcacagctatttcaaagtctggcacagcgaagcccctccagaaatgtctgcaatgaatggaattggatcaggtcagtgtcccgcttgacaaaaacaaaaagcaatgtctggtgcagcctgtctcacagaaaaatttccttcagggaggaggatgaaggtgaacctcctggttttagcaaaccaaaacaatatattcagatggaataaggcagattagcaattctcaggttgcaggttgcagaggcagaatttaaacgttttgggtaaaaaacaaaaacccacttaagatcgtattttttttcctttttttttctttttgagatggagtctccttctgtcacccgttctggagtgcagtggcgtggactgcaacctctgctcctgggttccagcgattctcctgcctcagcctcctgagtagctgggattataggtacctgacataatgtccaaccaatttttttttgtatttttagtagagatggggtttcaccctgttggccaggctggtctcaaactcttgacctcaagtgatctatggccttggcatcccaaagtgctgggattactgagcccctgcacctggccccacttaagaccttctatgttgcaggatttgaggttaatctcccattactattgaaggcttatctatttttccctttttgcagataaatgaggagttgtctctggtacaggaactaaaccagctctgggatccctaatggctgggctggcctggttgcttcagctctggattcaaactggccaaggatacaggagcccaggggtgagaatggtaagatcctgcttccagctgcctgccagaaccattgacttaaatgtgtataataacaggagctaacatttaatcatcctaataaagctatgaggtgagtacaagtatggccccacccagagatgaggaaaatgtagctcagagagaataaattacctactaaatgtaagacatcccaaaccgcttccttccccagtctttcccatttcactaaatgacaccaccccttactgtactaaattgctcaaacagaaatctggggatgacccttgattctttccttgcctcacccccacatcttacccatcaccaatttatctgttctatcttccaaaacacaggacatcctcaatgtggctatttctcttccattccccctgctatcaccatcactgtacccaccatcagctctctgctgagccactaactggcctactactaccacccattctcctccagcagtggcgggtgatctttttaaaacataagtcagatgccatgtcagccctcagtgaaaactctctaatgccttctcattgcctttatttttttctccgtctagttgtaagattttccctttgtctttcatttcctgtaatgttacattgtacctaggggtgattttctttctatgtatgctgctaagtgttcacagtccttctcaaacccatggctcgatgtctttcgtttacttgcaaatattccacacataatcacagctatttcaaagtctgtgtctagtaaccccgctatctggatccccttggacctgttttggttgtttgtttgtgtttttccccctgaattgtggtcaggtcttgtattattgtaaggatagacattaaataggaaaaatggtagagataatttatgtcatcttcctgtttacttttgcttcttctcagggattatacctggatctctgacctttgggcttcctacttccctggtgccatgtttctgccctctgcctctcctgatatgattattaattttatatgtcaactcagctaggccacagtactggtatttggttaaataccagtttagatatcccagtgaaggtattttttagacgagtttaacatttaaatcagtcaactttaagaagagcagattggggtgggtgcggtggctcgtgcctgtaatcccagcaatttgggaggcctagatgggtgaatcacctgaggtcgggagttcgagaccagcctgaccaacatggagaaacccatctctactaaaatcacaaaataagccgggcgtggtggcacatgcctgtaatcccagctactcaggaggctgaggcaggagaattgcttgaacctgggaggcggaggttgtggtgagccgagatcacatcattgcactccagcctgggcaacaagagcgaaactccatctcaaaaaaaaaaaaaaagaaaagaaaagaaaagcagattgccccgaaatgtgggtggatctcatccagccattaaaaggttttacaagaaaaggcctatggttcccccggggaagagggaattttgtctccagaacactttcaggcttgagctgcgatatcagctctttcctgggtggccagcctgatggtctgtcctgcagatttcagatccacaagccccacagtcacctgagccaattcctctctctctctctctatcacacacacatgcacacacacacacaactggttctgtttctcaggagaaccctaatacacttggcctgtgttcagtgacagcacccaaatccctatctgcagtctgggcctcctgggcttcagaactgaggatccattggcctcctctgtgtctcctctaggattcctagcgggcatctcagtcttagcacagcttcaccaaagtaagcgtctacttcagctccacgacctgctgtgtctcagccatcctggtctcagaggctggcatccattcttctggtggcccaggccctgctgtggtctgaatgtgtcccccaaaattcatgtgttggaaacctaaaccccaatgcaacagtgttaggaggtgtggtctttggggaggtgtcaggtcaggagggctccaccctcaggaatggattaatgctgctataaagaggcttgtgggaatgggctctccattctcctgctcttccaccatgtgagggctcagttcatccctttttgtctttccaccttctgtcatgtgaggatccagcaagatggtccacaccaaatgttggcaccttgatcttggacttccagcctttagaacagtaagaaatagattcctattctatgtaaattacccaatctcgggaattctgttacagcagcacaaaatggaccaaggcaaatattggtacccagaatgtggctgctgtaacaaacgcctaaaaacgtgaaagcagctttggaactgagtaatgggcagaggctgggacaggatggaagtgcatgccaggaagagcctgtattgccatgaacagcccattgagggtgatcctagtgagggctcagaagaggacagctgtagggaaagctggaatctccttagagattacttgagtgttcatgaagagaatgctggtagaaatatggacagtacaggccattctgatgaggtctcagatggaaatgaggaacagggtattaaaaacaggagggaaagtgatacttgttccagagtggaaaagaactgggctgaattatgtccatgtgctaggacttcatggaaggcagaacttaagagtgatgaactatgactaggcacagtggctcatgcctgtaatcctagcactttgggaggccatgacaggaggatcatttgaggctaggagttcaaggccaacctgggcaacataagaagaccctgtctctacaaaatttttaaaaaattagcaggcatggtggcatatgtctgtagacccagctactcaggaggctgaggcaggaggatcacttgaacacaagggttcaaggctatagtgagctatgatcgtgccactgcactccagcctgggtgacagagtgagaccctgtatcaaaaaaacaaaaaaaaaattgaaaaattaatgaactagatatgtggcagaaaaaacctctaagcagcaaagtgtgcaggatgctgtacatcctctcttagctgctcatagtaaaatgcgagaggacaaatgatttaaagacggaatgtataaccacaagcgaagcagaacacaaagatttggaaaattctcagcctggccgcataaagaataaaaaggtgtgttaaggagaaaataccaagggtatggccaagagcccatgtgataaggagatgagtatggctagaaagaagccaggtgctgttcatcaagacagtgggagaaagactctgaagggatttgagagatctggatgactcatctcatcataagcccagggcccttggagcttgagggcagaatgatttggggggatgggccaggggctggctgccttgggtctctactccttgtgttttggcacgatgctccttggccaccccagctgtggctcaaatgggcccaggtgtggcttgggctgctgctccaaagggtgcaagctgtgagccttggcagcatgcatgtgttgctaattctgcaggcacacagagtgcaagagctttgggggtatggctgcctccccttgaattcaaagaatgccacagagggatagcccccattagggcaatgcccaccagaattgtgaggttgggtctaaaactaagacaggccctaagtacccggagtcatccttgacttctctttctctccctgtctccttcccttccaccaatccattagcaaacactgttggctttacgttcaaaatatgaccaaaatcatctgagcacttaccaccttcaggcctgcttcaagccaccccctaccagccccttctcagaggcccccccacccccaggtgccatgtactctgttagcacctgagccacagctgagccctccactgcccaggaacctctgccactccccagctgctctgactaaacactggatctttataatggccctgggccttgaacctgggccttctctccctgagccctctgccactctcccctgctcacaccaggccaatgctgacaacttcccctctgtgctgttccgctgcctggaatgctctctgcccagatgtgtgcttgggtgactgcttgcctcccaggaagcttgcccaaatcttgcctcctcagttaggacagccccggccattcatctcaaaggcaaggggcacagagtatgggctcagtacacgtatgggggaggagggagggagggaggtggagagggaggaggaggaagggaggaatgcacaggccatttcattccagcgagaacaggtcacaaggcacacccaaaagcaacccgggtggtacaaaactaaagatgaccgaaggccaccatgaacaggcgggagagggcagctctgttcatcacccctggggcagatgtggagactccagatgtgtcacatctggacagccccttctctgccccttcctaccccctgccccgcccatccaccaggggttcaagacaatacaggagacagttgtcctcctcccaggaccctgagaatggctggggctggggaagatgctcagtggcctttgaaactcagcttaattttgcgccaaacgggtgaccctgccacccccatgaaaaggcagagcactagaatgagagtccagactatggactctagtcctcttgatgtcccaagctcagcatgtgacctcagactaggcacttagcctctgtgggcctcagtttccccttctgtccaaatcaggggggttggaatgtggtcacccaactaaaagcccactctatacactgagcgtctacaaatacaaggaacacagagttgatttgttaggaaacccatcacgtccatcctgacctagatgggtttcactctgacgttgtgcagtcaaatgctctacccctgagctacaccccctactctgacgttgtgaccgctgcacctgggctgattgtaccccagaccaggggcaatgtcacctggcaccaccctttcccactactcttccctctcgagagagactggggtttcacacagagcagtcgagccccataaatagcagctggccactcacaggccaaccctcccaggccccaaaaaggaagtgagagacaggcagacacttctgttcttcctgcagaaagtgctgcttctgcagtgactcgtcagatgctccccagagcccagcacagacccggctccacccacttctgtgggttggccagatgagtgagaaacacaggcacagccaacgagagggagctgaggccggacccaggagtctttttcctatggtaggggatatctctgtgtgaggaagccccatggggagtccttgggtgagttgccaggaggaggtgactcaggataaattcccttaggaggtgccttcacttctagatccaaagagtcatcccctacctccttagggtaaaactagattttgagtatcacggtgtttgtggataacctggccccagtgagtccccttgcaagggcctttggagatgcttctgcacatggacactaggagccatgagcagagacagtccctgcagcagcatctgaaaccatgaaccccaggaagacaacgtggcactgtttttgtcagccctgcctacgctttgctaaagtctgtccattcagctctttttcatgttgaccgcaccactgtttcctgcccaggtcctgcctgatatagtaaccgggaaagggatgaatgtgatgcaatgtgctcttgtaatggagcatcacagaacaggtcaaagacacaagccacacagcaacgagcgcggacaggcagggcagagcacagctgcacgtaagtacattttaaacacggaccccaacatagcactagacattgttcataatgcctccctacatatgtaaaacacaaaagtggattggagacacacagaggggagactgcaggcacctcagcctctcatccctcttctcatcaggccatttctgctctgcaccagcggttctcaaccaaagtgcttctgccttcactgtcaggagacatgtggccatgctggggacatctggggtgtctcaatgatgggggtgggagggattgctactggcatctgggggtagaggccagggatgttcccaaccatcctaggatgcaagggacagccccaccacaaagcaggtgtggccccagctcgttcacagctgtctacttcctcctggcgtagctgtgcaacttgtacaaccacaagcaacacgtatttgttttacaaggaactcactggagacagcacccagtctgagaactttgtactatggaagggttttgtttttgaaaaccgaaattacagaataaattacagagagagagagagcaagagcgagagcgagagagtaagagagagagagaaacttcaccatatgggttcaaatgagcaacctgggtattcttggctcctggtggaaagggaggtgctaatctcaggtgggcccacctgctgtggcatggggcttggttttgagctgctccttccactcctggcacaggaggagcagatgtttagggcggccacgtgactaactgggcagccaagaccaagactcctgtgcacgctgaaactcacgttctcagtggaaaggaaagatctgctgaccgctcactcaggatgaggggtgtggtgagtcagccgtggggcctctgtgtggcccagaccaaacagctggttttgggcatggcagaagtcaatgaggcaaggccctgatgggtagcgctgacctgagtgctacctggctaaagccaaggaggagccatgcggcagaatccgttcatgcagctcgcatgctacaagtggctgctagtgtcttgtggagatttaaacttaaaatcttgcttctcagccccatcaggtacatttcaggtgctcagcagtgcacttgtgctttgtggctgccttctggacagcatggatgcagaccgcctccaaccatcccagaaagttccatcacaggcactgagccaaaactggccatggtgatggagctgccaggagggcgaagcccaatctcactttggtcaacatggtcaacatgtcagggaagggtatccagggacaggtgcccaggggcgggtgcccagctgcagaaaggtcttcagggaacctccctgctcagaggcactctctcaatgtcatctcctgcctcccagcccaatcacactacatcctgtcttggctgctctcctccactctgccccaagcctgaagccatctgtccttcctctaagctccaggagtctctgggaagtgtttatgggttaactctgttggaatgcacagggattgctcagaataaagctcaccagcctttgttggcctggaggccctgcctgccctgcctctactgcctctctgtcctcccccctggctctctccaccccagcctaggttccccaaacacatcaggcagggcctgcttgcggcctttgcagctgctgttccctctgctcagaatgctcttccccaacgcccccggtcatccccctgccccccactgcttcagtcagatatctcaaatatcacctcatcagaaagcctcccattctagccgaaagagctcaggtatatgcacactcacacacacacacacacacccccacacacattcacacatgcaccacactcacacactctgattctcacacacactcacacacaccctacatgcacaccccacacgccccacaggcacactctccacacactcacacaccccacaggcacaccccccaaacacacacaccccacacaccccacaggcaccccccacacactcacatactccacaggcacaccccccaaacacacaccccacacaccccacaggcaccccacacacactcacatactccacaggcacaccccccaaacacacaccccacacaccccacaggcagccccccacacaaacacaccccataggcacagcccccaaacactcacacaccccacaccccccacaggcaccacacacacactcacacaccccacaggcacaccccacacatactcatacaccccacaggcacaccccccaaacacacactccacacaccccacaggcaccccccacacactcacacaccccacgggcaccccacacacactcacatactccacaggcacactcccccccccacacacacacaccccacaggcaccccacacagacattcacacaccccacaggcacaccccatacacacacaccccctgcgcacacgcccacacccggacacagcccacaggctccatgcgccccgcatgcccatgctgccggcaacccgctgtgattttcctaagcagacgccccctggcggctgtccctccaccgatgctggagaaagctggcacccagcagccgctcccaggctcaggggcctgaacacctcctcttctcttacctggctgggattcatgccagccaagggcctcagaggggatatgatgggtttctgagagtcagagccctcgaatggggctcccagccctatgctttggtttccccggctgtaggaaacccgtgtggcaggaggacaggtcactggactcaggatcagacgagctgggctccagtcccaacactgtcctgactggctgtgtgacctggagcaagttcacttaacatctctgaacctcactctcctcctcactgaaatgagggagtcagtgtgttgagcagggtttggtgaaaatgtttctctcctggatcctgagtggtggtgtcactgactacacacactctctggaaggggatttggtaacatgaatctagagcaggggtctcaaactcaggtggccctgggagccaggtaggtgatgtaatagagagagagcccattagcacaagggcaagggcagctctgatttttttttttttttatatatatatatacagggtcctgctctgttgcccagactggattgcagtagtgcaatctcagctcactgcgaccttgatgtcctgggcacaagtgatcttccagcctcagcctcttgagtagcgacagatgtgcacctcaatacccggctacatttttaacttttgtagagataaggtcttgcttgttgcacaggctggcctcaaacccctggcctcaagcagtcctcctacctcagcctcccacagtgctgagattacaggcctgagccactgcacctggcccgattttaaagaaaaaaattggtcaggtgcagtgtctcatgcttgtaatccctacactttgggaggccgagctgggtggatcacctgagatcagcagttcgagaccagcctgactaatatggtgaaactctatttactaaaaatacaaaaattagctgggcatggtggtgtgggcctgtagtcccagccacttgggaggctgagacaggagaattgcttgaacctgggaggcggaggttgcagtgagccgagatctcaccactgcactccagcctgggcaagagagagcaagactccatctaaaaaaaaaaaagaaagaaaaaaaattttgaggtaaaacttacataacataaaattcatcattttaactattttaaagtgtacatttcagtggtgcttaatacactcacaatgttgtgctaccatcagcagtatcccattctagaacatgttcatcacatttaaaggacacccgtacacattaagcagtcatcccccatttcctcctcccctcgttccctgaaagccattcatctcctttctgtctttctggatttacctattctggccattccatataaatggaatcataccatatggaatcttttatgtctagcttctttcacttagcataatatttttatagatttatccacatcatagcacgtatcagtatttcctcactttttatgtctgaataatattccattatggatagaacacattttgtgtatccattcatcagctgtgcacatttagggtgtttccaccttttggccattacagcaattacaatgtactgctaagaacatttgtgtacaagtgtttgttaccaattcctttgggatacacagctaggagtggaaatgcagggtaattctatgttaaactatttggggaaccaccacattgttttccacagcaactgcaccatcttacatacccaccaggagtgtacaaagcttccaatttttccacattttcaccaatacctgttattcccccggccccaaaattatagccatcctggtgggtgtgaaaaggtacctcactgtggttttgattttatgtccctaataattaatgatgttgtacaacttttcctgtgcttattggccacttgaatattttctttggagaaatgtctatttaagtactttgccaatttttaagttggattatttgggtattttgttgttgagtggtgagagttcttcctctatcctggatactagatgtttatcagctatatgctttgcaaatattttctcctgttctgtgggttgccttttcactctcttgatagtgttctttgctgtatatacgtttttaattttagtgaagtccatgttattttttcttttgttgcctgcacttttgttgtcatagctagaaaaccactgccaaattcaaggtcatgaagatttaccattatgtttccttctaagagttttatagtttcagctcttatatttacaattttaatcaatcttaagttaatttttgtatatggtgtgaggtaaggatccaatttcattcttttttatggatatccaatagttccagcaccatctttgaagagactggcctttccccactgagcaatcttggcattcttgtccaaaatcaacaggccatatatctgagggcttaattctggactcttaatctatttcgttttctatatgtctgctttgtctcaatccattccattgtctatatgtctatattccattctgtaagtctgtccttatgccagtatcacaaccttttgattgctgtagctttgtagtaagttttggaaatcaggaagtgtgagtccgtcaatttatcctttttttcttttcaagattgtcttggctgtttgcggtcccttgcaattccatagcaatttgggaatcaacttttccatttctacagtaaagcccattggaattttgatagagatcgcatcaagactgtattttgctttgggtggtattgcatcttaacaatattaagtcttccagtccataaacatgagctgagtttccatgtatttaggtcttctttaatttctttcagcaatgcattgtaagtttcagtgtaccagtctttcatctccttagttaaatttattcctatgaattttattcttaaggatgctattgtaagtggaattgttttcttaagtttctttttggattgctcgttgccagcatatagaaatacaactaatttttgtgtgttggccttgcactccacaacattgctcaattcctctgttagggctaatagtttttcagcagattttttcctatataagatcatgtcatctgtgaatacttttatttcttctcttccgatatgatgccttttatttctttttcttgcctaatttatctggctagaatcccagtactatgctgaacagaagtggtgaaaattgggcatcccgtcctgttcctctgttggggtaaatgctttcagccttccatcattgagggtttttcacaaatgtgctttttcatgttgaagaagtttcctctgtttcaagtttgttgaaggtttttaatcatgaaaagatgctgccttttgttaaatgctttttctgcatcaattaggatgatcatctggctttctcccttcattcctgtaatgcagtggattacattgattgattgggcagctttgattttccaagataagctgtaaatctgcattctgatgggaaatcttacttttaaaaatgtgtgcacaggcccggtggctcatgcctgtaatctaagtgctttgagaggctgaggcaggaggattgcttcaggccaggagtttgagatcagtgtgggcaatactgcaagaccctgtctctgcaaaaattaaaaaaaaaattagccaggcatggtggcatatgcctgtagtcccagctactatgaaggccgaggcagaaggattgcttaagcccaagagtttgaggctgcagtgagctatgatcacgtcactgcactccagcctgggcaacagagtgagacctcatatctaaaaaacaaaacaaaacaaaaaaactgtatgtacataaaaaaaaaatgcataggccaaatgaaactcagctaacagacaaactggctctggcccaccagtttgaaatcgctaatcaagggacttaatagtcctccctccctttgactcaggaattccacttccagggattcatccagaagaaataatccaaaatgtgggcaaaatttgacacctgcacttgagtattacctttaattgccaaagctagaaagtccctgaacacccaaaaataggggacacaaaaatgtcacagtcagcctactagagtgaatgttttgcagccacttagaatggctttcatgaagactatgaaatgtcatcaatagatacaggtgatatcattttaatgaaggttgttcaatatcaccacaattgtcatctactatgaacataaactttttttgtgacaaaaagaagaggggttccccaaggcctcctctctggctggggtagtgtggctcaacaataggtcatctccccactgcccgcctttcctctttttccaaatgtggaatgatgtcctgatataacgtttcttggcacttcccacatttgattcgcattttaagcacttgactctcaggagcacatctccacacaccagtttccctttggctggctgcgtgctggtccacagccatttgccctgctggtcccacataggaagtgctttgggcagaaatccaccccctgtcccacccatccctgtttttcataagcacttgaatcaaaacaatctttttgttattgttgttgttgttgttttcagacagagtttcgctcttgttgcccagactggagtgcagtggcgcaatctcagctcactgcaacctccgcctcccagattcaagcgattgtcccgcctcagcctcccgagtagctgggattacaggcatgcgccaccacgcccggctaatttttgtgtttttagtagagacagggtttctccatgttgatcaggctggcctcgaacccccaacctcaggtgatccgcccgcctcggcctcccaaagtgctgggattacgggtgtgagccactgcgcccggctgaatcaaaacagtcttgaacatcgtttctcacattgctggctggcagggaggcacctgtctccaagaattcaacaccatggacaacgggattcactgggctgccattctgaccgttgcaaccgcaaccctttctctaagcagctgggatcacagcctcttccattcttccttcttgtatatcatgtcatggagcagatgctacacacagaaacccaacagttctttccaggcttcaacctgtaaaacccgactccactctgagtattccaggcccacacatcaatgacagtgccttgaaaacagatttaaaaaagaaagggcccctaaccccgctcagcctccccgaggagttgccgctcagctgcgtgctgtgaggtagatgtagagagaaaatgcttcacaaccagcaagccgggtgcggtgtggtgcaggcccatccagccgcccacagcgccctgctgggctcagaggacaggggacgctgcaaggggtggggcagggctgcgtggagggggccctgtttgagctgagcctctgtgctgagttcagtagtgacctccccaaaagtcatgtccacccagcacctgtgaaggtgacgtgatttggaaatagagtcttctcagctgtgatcaagggaagatgaggtcttgctggattagggagggccctaaccaatgactggtatctttataaggcaggggacatttgcacagagacacaggaaggaaggccacgtgaagacggaggcagaggttgcatccagagcccaggaacacctagggctgccagccaccagcagaagccagggaaggggccaggaggggcagaacctgccgatccctcgatcctggactgtggcctctagaaccctgacgggataaacttctgttgtgttaaaccccatttgtgacactgtgtgatggctgccacaggaccctggcagcttgaagaaggccttatctaaaggcccctcagcacctatgggtggtcggccactcctcctgggtgacagccctcctgggtgacagccctggtgacaaccctcttgggtgacagccctgggtgaaagccctgctgggtgacagccctcctgcgtgacagccctcctgggtgatgcccctcactgccccttagtggctgactggcatgcaacaaggcaccaggcgctggcacctccctatggtcaccagcatgtggcacccctgacctaggtgctgggcacactgcaccccaggttcctggtcggactgggaggagctagtttgggcggggtggagccctgggccgccaaccctggaccaaaggcagatggtgagcatgggtggacccggcttctttaccttcccgaggccttgggtgaggggctggctgcctgccctgtgcagaggactttgtccttggagcaggtgggtgcaatgaatttcagggctctgacccagggacagaggggcacagaggggtaaagggtccctcactctcgcccagcccctagtcacaatctgggaaaatttccagaggctgtgtggggtggcgtttttcaaaccagtccagtggctcaaaagcagtccagcctcccctctgactctcagaggctggttctgagaccccgctcccatgcaggctgacatgagagggagtgtctatcccaaggggggcaggagcagccttcccgtctgaggatccgctggggtgggtgggctttgtcctcctcctgacagagggaaatgctggcttcttgaaggaccattccttagggtggggtggggtggcatggggatgggaatggtggaaagagcacagatcaggagggagacccagagtccagccccctctgctgctcacctgctgggctcctccctcctctggccgagccttggttttctcagttgtaaaatgggcctgactctgtccctgtctttcatggatggggcatcagctgacccgacaacatacaggaaaagctctgcagagaaacctctctgagtgcttttggttttcagtctggggttttgttttatgtatggtaaaatgcatataacataaaagttaccattttaggccagacgcagtggctcacgcctataatcccagcactttgggaggccaaggcgggtggatcacgaggtcaggagatcgagaccatcctggctaacacggtgaaaccctgtctctgctaaaaatacaaaaaaaaaatagctgggtgtggtggcgggcgcctgtagtcccagctacttgggaggctgaggcaggagaatggcgtgaacctgggaggcggagcttgcagtgagccgagatcgcgccactgcactccagcctgagcgacagagcgagactcagtctcaaaaaaaaaaaacaaagttaccattttaactattgttaagtatctagttcagtgtcattaagtacattcacattgtgacacaaccatccccatcgtccatatccagaacctttcatcttatagaaatgaaactgtccccatgaaacgctgacttcccttcccccttccccagcccctggcaacccccattctactttctgtctctagagatctaactactctagtgcctcacctacatggaatcatacacgatttgtctttgtgtgactggcttatttagcttagcataatgttctcaagccccatccatgtggtggcctgtgtccaaacttccttccttttgaaagctgaataacattccactgtgcagatgtcccatagtgtgcttctccattcatccgtggagggacatccatggaagggacaccacttccacatttcagctattgggaataaggctgctgtcaacacgggtgtgcacgcatctctttgagacctgctctctattcttttcggtatgttcccggaagtgggatgcctggatcatgtggtaattctgtgtgtgtgtgtgtgtgtgtgtgtgtgtgtgtgtgtctgtgtgtgtgtctgtgtgtgtgtggaatctccttcctgttttccttaacagctgcaccagttgacattcccaccaacaatatgcaagcattgcagtttctccacatccttgacagcatttgttattattatttttttagagtggccatcacaatgggtatgggtgatatctccaggtgtttgagcagctaggatttgatgcaggcatccagcacttacaaaatccctgggtgagttggaggagaggtcttgggttgcccctgccccatggctcccagagcccagcagaaccaagctgcccaggaggtaggaatcagggatgccactgaagcaccactgacttcgtggggtgcagggacctgggatcagggccactgggcagctcaagaccagacactggaacattgctttagacacttccacgtgcctgtgaccctgctgggtggcagaacacagcccagagctgccaaaagatgtcccccacccccgcctccttgatctcacctgggcgtgttactagtggatcctaaccctggaagccattgcaagggaacctggaaatgtagccttcagcttcccagtccctgctggtcaggaaggcacaggaggaggaggtggaaatgagtgtggagggccacatatcaggccaaagcagcaggcactcagaacacagcggcctagaagcagggtacaggaagggatgcccctcagccacaccagccttcagggccccaggcaggctccctcctgccaaaggtctttgtgtatgttgttcctgccttatcaagtgttcctccctatcctctctgcctccacatagcaaggtaacttccactcagccaaaaactatcactgtccagcacagcccaaatatccataaacagaaaacatcaacaaatgacagtatattcatacaatgaaatactatacagcaatgaaaaagaatcaccgacgaccacatacaacaatatgggaggatctcacagatgtcattgttgagtgaagaagccggactcaaaagagcaccattcacaaacctccattactaggaagctcaaaaagaagcagaattaatctatggcacaagggtagagaagaatggttacttctcggggggtggggggagtgttggatgggaggggacaaaggagccctctaggggctgggcacgaacttggtcttctccagtttggtctgggggctgagcctgaggcacccatgggtaaaacttcatcaagctgaacacttaaactgtgcactcttcctatgatgaaaaagtaaaaataaaacagacccctttctctgagaagccttttcccagactagagcaccttccccaggatgagctgccagggttctgtgcacccctcctgccaggctattgtcgtgctgtgacggtctgtttccctgtgggatggtgaggtggtctgctcccccagacagtaagctccatgcaggaagtctctctgtctttccagggcctgtatgtccagtgctcagatcttaagcatctgctgcaagcgtgggtgacccccatcgtggaacaagcccactctctggcaacagcaatgtgaaccttctgcttgtaatgtaaatgtgaaacccagggccagtaagagattcctcagatttgctgtgcagccatggaaggcaggtttttcaaacagaaactcttcttcctaaaaatattcgatgttcaaatcttttctctgcaaaaaagacggaggaggaagaagtgaagttgctgtgcgtgagcccacctggagggcagcagcccaggaagggccaagggactgacagcgacagctcaagcattgcagcacctgggcctcctgctctcccaagccagcaggattttcactgactcccagatggcagagccaagccagtgagagacagatgttggctcaagtggttttgagagctgatgagttccctgtccctggaagtgtgcaagtagagactaaaggaccactcctgagaaatattgtgagacaagcaggggttgggactggaaggatggcccttggaggacctcagagacccaggcctcttgtgtctgtgtccttttggaactcttggtcttcgccgagggagggatgccctccaggctgcctgggaccacataaggtcttgggagacaggagcagcagtagcagcttcgtgtatgaaggtgctcccagtgctgggcactgtagggagggctatcctaccacatcctctcagcgaagggcttttgtagagtatggttaagaatgcagatctgcagtgggtcacgcctgcaatcccagcacttggggaggctgagacaggaggatggcttgagcccgggagttcgaggctgcctaccccctgcaccccagcctgaatgacagagcgaagagaaatcctgttgtctctttatttgaaaaaaatttttaagtaggttctggagccggaatgttgcagagaaccaggcgccggcgcctcccaatggtcaccagcaggtggcgccgctgacctaggtgctgggcccctcggcacccctcgttctgggtggcgctgggaggagccagtttgggcggagaggagccctgggccgcctaccctggactgaagtcaggtgttgagcacgggtggacccggcttctttaccttcctgaggccttggtcgaggggctggctgcccgccctgtgcagaggactttgtccctggggtgggtgggtgcaataaatgtcagggctctgacccagggacagaggggcacagagggtaaagggtccctcactctcccctggcagcggccgcttgtcacagtctaggaaaatatccagagactgtgccgggtggggggttttgcaaaccagtccagtgggtcgaaaccagtccagccgccccactgaacagattctgcagtgggtcacacctgcaatcccagcgcttggagaggctgaggcaggaggatggcttgagcccaggagttcgaggctgcctgccccctgcaccccagcctgaatgacagagccaagcaagaccctgttgtctctttatttaaaaaaaaaaaaaaaattattttttgtttgagacagattctcgctctgttgcccaggctggagtacagtggcgcgatctcggctcactgcaagctccgcctcccaggttcacgccattctcctgcctcagcctcccgagtagatggggaaaaaaaaaaaacttttttaaggtaggttctggagcccgactgtctggcccaactccagctttgccactgtctcgggcagggctcagaatcagaccccagaacaaggattccagagcaagtgcttggctggggagatgcaggaagccccaggggagggcacgagaggcagggaagggaagaagccagtaaagtatgtgttatcaaggcagttaccagggaagcaccaggctccctgctgtggggagccctgggagacagcgtggagcaggccccagaggttgccccgctgaggagcaaggggctggagtagttgtccgccacccccacagccactgttggctgagaccctctcctgggacagggactctccaggcctccagcggtggaacttgcccgtccttgcagctgggagaagcagcccaaggatcctgctcaggcgtcccaggcttagacgtgaagaggcgagtcctgcatggggagggtgggtgactgatggatgggacaccagctgtgtcctctgcggccactgggcagctgtgtgacctcaggcaattgctcagcctctctgtgtcttctcatcctcctttggtaggaggctgcctaggcccagtgaaggtagagggcctagaactgcgcctgacacagcactacgcatgccaggatctcaggagcccaagaggtagtcctgtcacaccccgtttcacagaggaggatgtggaggtcagagtggctaagacaactgctcaatgccactgggcaccagagggcagatggggcttgggggaccctgatcccacactcacaggacccctgtccagtgcgctcctgtgggtagatcaaggcaaggctgcctctaggaccacctccctcttgccccgcaccagccaggcatcctctgggcagggaccatggcaacacggcccccacctgtggccgggccttctgggtcctctccaggaggtgtctaggcaccacgctgtggcatcagcatcacacacaatgctgagatgaaaagtcttacgcaggtgtcttcgcacacctgagcaaacatttctacaggaataatttcccccagcgggattcttggatcaaagggaagcacacatgattattctagaagttgacagccattgtccaattgacaccctcacccacagggctctttccccacatccttggcaataccaggtccttgtttttaaatctgtgccgacccgatgggcagagagtggcaccttgtcatgctgtctcctgcctgtttgatccaggattttgtggaccgtgggtttggcagctgctggcacttcttctgcacgttccctttttgtgtccttttccagattgctatttctttggggcttttttcttagtgatttgtagggtgctttaaaataaaatcttctgtctgccatggtctgtaggtgacaaatatttcttctcagctaattgttttattttcagccatgttggtggggactttgtgattgttttgttttttgtgattggtctttggaagttgctcatgtttgtgtaatcggatttgtcattcttttcctttgtcatttcagagtttgtgtcaggaattcttccctcttcaacccattcctccacctccctccgcagactggccggtgttctctctagatctgcctctccctccatgccatgctctcgggcccttcgtggtgaagccaggtggccgtcctcctgcccctgcccctgaaggagaaagctccaagacctgctgtattcatgtccccttcctggaggcccaccttcacgtgcccacctacctcctcagcatgcctgagcccctatcgctttcctctcgcagcagcctcaggtgcagagcccggggactctggtctgacaccgatggcttcttaactacaatcagcacacctgctgctcaccacccttggccaggccaagccacagccaggcccagccctggattcgagattgttatttctgcaaaatggatcatccaggcatctctggcttgtctctggcccccccgcacccctccaccacgcccctgggctgctgctgctgatgtctccttcctgcctacatcggacccagttcccccatgttcatccctggggctgggccacctgctgctccccctggctcatccactgcccgttaccaagccgcacacagctcatcgacctacagccacacttgtcacacctccttgcagaccacgagtccagagaagcacgtgatgcaacctcccacacctgactcttttacaaaccaacaggccactgggaggctgctctccttgtctctggggtggcagcaggggaagcaggagaatgaacagcctccaaaacttctcctcagacggagccgccatggaggaacaaagggtcaccatcaacaaagtccatttagcccaatcagcctcctgcccagcaaaccagggaggcatgctctgccctcagccctcaggtcccaggggcccggccctggcagcctctttgttattcctggctcccgggaccaggactctcagggtgcccatgccagggaggcctgcatggccgggagcaggtatttccttctgtgccctctgcgggctcaggaagaccccaccctgcaggtggcaggaaggggctgtgttgagcaaggggcccagcagctggagtgggcctgggtctaactctccactcctgtttgcattggcaaagcaccgcagctgacacgggctgcgggagcaccacgctcagaggagccggcgacggctgtttcccagctgctgtgcaatttgctgagttcaacacacatgtattgactgcccactgtgttttctgtgctcacttggaaattctgttgagcgcctactatgtgctaggcacttgtctgtgtgctggggatatggcctggggcaaaggtgtcagttcagctcccctgggaagtagacaacaggttggagttagagatacaagaactgtgttaggagaaggagctgtaaaggagaaaggggcgaggggcagagcagtcagggagagcatggagcgcaccaagcacaatgcttgtgaaggagaggggccactggagagctgggcgggggagcctcacccggccccagggggtctctggagcaaagatggccagtactggggtcccaggttgggcaggatgatttgaatgtggcggaagatccccaagtagctggaggctgtcagctgactgcacttcttgcagaggcttctctcttgaaggccgacctgagaagagcacctccatggtggccacgggagattaaatgcagctgccatcctgtggaggggatggacaacacaccaagcagcaactgcacccccttctagaacagaggccccaaatgacagtgcttcaagagaggtgggagctggctgtgcacagtggctcatgcctgtaatcccagagctatgggaggccgaggtgggaggctcacttgaggccaggagttcaaggcctgcctgggcaacataacgagaccccatttctacaaaaaataccaaaaaaaaattcagctggacatggtggcatgtggctatagtcccagctactcagaaagctgaggtgggaggattgctagagcccaggctaggctgcagtgagctatgatggtgccactgtactgcagcctgggtgacagagtgagacccagtctcttaaaaaaaaaaaaaaaattattaaggggagggcaagcccttttccatactttcttaaccctgctgtttaggatgtggacatgatggtgcactgtcttgagctacatggacaagagaaacaccctagggatgggagagagaagggtggatccctgaataactgcatggagcagagttgccaccgcagccctgaactgccctgccacccctagacagtgtgctggagaaatgaacctctgtcttgttaaagccactgttgttagacgtagctaaacctagatcctaaatacaaacatagcatgttctttttttttttttttttttttcctgaggcggagtctcactcttcgcccaggctggactgcaatggcacaatctcggctcactgcaacctccacctcccaggttgaagcaattctcccacctcagcctcccaagtagctggtattacaggcgtgcgccaccacgcctggctaatttttgtatttttagtagagacggggtttcaccacattggccagactgctctcgaactcctgacctcaagtaatccgcctgtctcagcctcccaaagtgctggggttccagccactgcacccctccacacatagcgtgttctttttgtccacataaaacttaccatcttgaccatcgtgaaatgcacagttcagtggcactaagcacagtctcattgttgtgcaaccattaccatcgtccatctcaagaactttttcgccgggtgcggtggctcacgcctgtaatctcaatgctttgggaggccaaggtgggcagatcacaaggtcaggagatcgaggccatcctggctaacacggtgaaaccccgtctctgctaaaaatacaaaaaattaggcgggcgtggtggcgggcgcctgtagtcccagctactcagacgctgaggcaggagaatggcgtgaacccaggaggcggagcttgcagtgagccgagatagggccactgcactctagcctgggcgacagagcgagactccgtctcttaaaaaaaaaaaaaaagaactttttcatcttcctcaaattgaaactgtctccaatgaacagtaaacagtaactccccattccccttcccttagctcgtataagtggaatcatatagagtttgtcttttcacggaatattacgccctcacgttcttccatattgtagcatgtgccagaatttccttcctttgtaagactgaataatatttcattgtacgcacagaccacatttttgtttatcgatggtcatttgggtggcttccaccttttcgttgttgtaaagaatgctgctatagtgagctgagatcacgccactgcgctccagcctaggcaacagagtgagactccgtctcaaaaaaaaaagaatgctgctataaacatgggtgaacaaacatctgttggagaccctgatctcaattatttttggggtattttttggtatatacccaaaagcggaattactagattatatggtaattctgcacagtgacttttccactagtgtttaacatggtgtcttgacagaatagctgtaagattacactgaaaaagcagcaggggaagtgctgtgaaggcggcccatgagcttgtaggaaaggcggtcagcagcacacctccactgtaatgggtttgtttacccgctagcctaccaacagctgcaggcccctttcctggccctggccctgcccctgccccacattgctccccacattagacccagctgtgctgcacctctgcccttctgccccggctcctgcttgttacagggaagggctggagggctctttgtccaggtttgtcatccaatatgagcactcagtgcacacggatggctttacctggcactcagccagtgaactcagcatctgctccggccctttagcactgagctaggctatctaccttcataggccaatcacaggttgtcacaggtaaatgaccacatgtggtttgtgcctcactttctgactttggaacataatcccctggtaggggtgggggagggccatttttctggagcttcctcctattttcaagctttatcatgcagaacaaaaccttctaagcagaagcctcaatgtcctctttctgtgggttgcatgtgtcccccaaaaggcgtgtattcaacacttaatccccggtgcaatggtattgggagctggggcctaataggaggtgtttaggttataaggtgcccaccgtcacgcatgggttaatgctgattataaaaggccttgagactgtgagtttggtctcttaccctcctgatttccaccatgggatgaggcagcaagaaggccctcaccaaatgctgggctcaggccagcaccatgcccttgggcttcccagcctccagaattatgagccacataaatgtctgattattataaatgacccagtctcaggtattctgttatagcagcacgaaatggactcagacatctgtctgccagccctgccctcctgagggctggaatgccgttcgctgcacttcccagcctctctactttgcctcacactgacttccctccctggaaccagcagttcctgcttatttgggcgttttcagatcttactgatctttcaagggcacctcctctgtgaacttacctgggtccttcccagcttggagggatctcacagcacattctgtagccagtaccatgttctaccgtctcttctaaagcacagttcctgggccagagccccagcatggcctgcaggctgcaggaaatgtgaattccaaggcccccctagacctcctgattcagaaactggtggtggagccaacaatctgtgtcttattggcatagatagttctaggtctaccaggctgccaggaggcctcaatggcttgacaatcatggggcacgaagcaacgcccgcgagtcagcagcagggggtcccagctggtctccccaagggttcttcttccctcctcttcttcttaaagtgtgggaaaatttacagcaaagtacacaaatgttggtgtgcaaatcaatgccttttaacaaatgtgtccaccccgtcatcacaccccagatgaagacatggaacatttccaggaccccagaaagctccctggtgcctccttcccgtcaataaccccatcctccaccagccccaccaagaaaccaccaccaggacttctgtctccatagatgacttttgcctgttttttttttgttttttttttttgagacggagtctcgctctgtcacacaggctggagtgccgtggcaccatctcggctcactgcaagctctgcctcccgggttcacgccattctcctgcctcagcgcgtgagtagctgggactacaggcgcccgccgccccgcccggctaattttttgtatatttagtagagaaggggtttcactgtgttagccaggatggtctcgatctcctgacctcgtaatccacctgcctcagcctcccaaagtgttgggactacaggcgtgagccaccgcacccaaccttgcctgtttttgacctccatactgtgcatgctcttttgcgtctggattcttttgtctgactttatctgcgagattcatctaacttgttgcatggaagagtcatttggtcttttcctctgctatgcaatgcaggagaacatttgtttgtttttagtttatagaatgcagtaagttttcttttggtggacatcagcacttgtttctcttgggtgtctgaccctttcccatgctttccaaccctagcttctaagctctctgagggtacagagtttgcctctgtctatcctggcctgacacgcagtctcctcctgtcagcatttactcagtccaaattgcaacaggggcaggtccctgccagctgagggagctattcttccagctcagcagggggttggccagtcttgtcctctgggacaaagcccagccagagttctgggcactgtggttcagaaggcctgagacacgtggttttaccagggctgggtaccaagaaccatgcttgaggctgacggcatttcattggcagcgtctgtggggggcttggggactcagccgtgggaagcctgttctgcacacagccatggcgcaagaaatgctttttcctgcgacggttcagtgagaaccatgatggcagtggtgcagcatcctcccagcttggtttttaaacatgggaagggcttctaaaaagtcacacagctggttaatgtttgaaccagggtggcacaggtttgtgcgaagcagtgagtggagctgtctgaatgccaggaggagggtcaccctggaggcgggtgacacaggggtcagtgcaggtcagaggcagaggctgggcccagatgccatgcgagctccaggccactttcccagagaagtgagcggcggccaggctgccggaggctgtgtggcctcttcaggccctcactggtcctgattttgaggggtgactcatgccggcttggacatccacttctggctcaagttgctctgggttcctccacacagaccagagggattcctgcgtcacaggaatccaggaaggggtggggggagttgcaggttgagaagacagaggtgagtggcccccgggcccctcccctgttgagtcacgggaagggaatggaaatagtgtgtgctgaagctgagtcagggcccagcctcaccttctcgggacctcatatgggctctgaggcgagaggcccacctgtccccccctccttgctgcctcctctcccaagcatgaggagggcgagcaggaaggatttaggttagctctcaagaaggacttcctgaatcgcgccaggcgacactgagaggcatctctcaaaggaagttgtgaaatcttccttgggaccaatttgaggtttggtctgggtccaaccaggactatctttatggctctagaatattttcaagtgttagacattccttcctcgacatgactcagggagcatccgatgtgtgccaggcctggtggcaggagcagggccagctgagtgtgggacatgccccactctgggggtcttctctaggtcagcattacagcagccttggagaagacggctcccaccccttccgtcctcccctctcctggctcccttgggcagcctgctctgccagccacaccacactccactttcggattccggaaggaaactatgggtaataaataggacaaagggtcaatttccttcctgtgcaaatcccagtagcatttgcagagtgccaagcatgggagggcgccctcctaagtgctttacctgccttcactccaccacagccctgtgaggaaggtgctcccctttcacagagaaggaaactgaggctcagtgaggtgagcagcctggctacagtggcactgccagtgagcagctgacccagcctgtgacctgggctgtggcacagcaaacagccagcaagcactgggtgcttttcctgtgctgggccagcactttgcaggcatcgactcaattgaaccctcacaaccaccacacattggtaagaaaaccaccctgacagtcctgggaaaatgcacagtcttagtgctctgaaggaaacaaaaaaggacacatcagtcatcaaagaaaacagagagatccatctggagtgccttgaattggcaaatggtttaattttcctgtatagggacgctggccttgctggggcaccatggagcggggccccgtgctggtgggttgttcactgggaccacccttctggaatgtgggaaggcggcatggcaggacccaccgaatgccttcaaaagccagtggtccatgcccctgtctccttccttagagtcttccagaaaagactggtcagaggtgcagcacagataaacctacaaagcttttcatcaaagcatcacttacaatggtgaaaaggcagaagaatcactgaattccaccaaggtggagcagccgaggaaatcgtgggtagaacactagggagtcacaagaaacaacatatttgaggggacatttatagcagaggaaaatgctcatgatctaatgctacacaaaaagggcaggatacaaaataaggtgtattggaagaaagagggtggcatggttgtccatccactgctttcagggactggactaagtgacctggatcagagggagggcaagagatctgcttcctgcctgagccctgtgaacagttgaaatcactcgtgtgtctgcaggaatcattcttatatttgctattctgtggtaacttcaaacctacacaaaatttgcgagaataaaaaacaccctgccacatactcttcacctacattcacccattgttaacattttgtagtatttattttctctctcattcttttttttttttttgacagagtctcactctgttgcccaggctggagtgcagcggtgcgatctcagctcacagcaacttccatctcctggatgcaaatgattctcctgcctcagcctcccaggtaactgggactgcaggtgtggaccaccatgcctggcttatttacttgtattttagtagagacagggtctcactgtgttggccaggttggtctcaaactcctgatctcaaatgatctgcccacctcagcctcccaaagtgctgggattacaggtgtgagccaccacgccagcctgtttttcacatttctatttcatgctccagaattcaggagctctaagaggaggctgcctgggcgacctgcctgtggtaagggtggacaggctgcctcccggctgctctgaggatggccctgggtctgagggagggcattgcactctggcgtgtttgggactgggctttggagatgtaaacatggagcgtccctcaggaacccagggcaggcgcccctgggaagaggaatggctccttctttcctccctcagtccctttcctgaatgcctatgtcacttctgggcacacaggggctcagcttgcagggagccactctccaggtgaggctaaggtttgggggctctctctgtgctccatctgctccagcactctctcctcagatgggcctcctctgttctctgctttgctctccctgcaaggagtccaatcctcgaaggtgggagagtccagagaagaaaagagccaaatggaggaagaggaccctgggaacccttgggtgccgcagagcttgggaggtgacgcgtctggcccaactctgctcctctctgccggttcccaaagccagaagtaggcagctcccttatcctgtcttttcagaggaagtgttgagtccaacaggatggggttcaaatcccagcttcaccactgattctggacaagtttattctcctttcttagcctctgtttcctcatctggaaagtggggctgtctgagactaaacctgagaaggcacaggaagggcttcccgtggcttctgcaaagagctccacgaacactcgctctccttcatccgagcagcaatcctcgctgggcctcaggtgcagggggtagcggggaacaaaacaccatccttgtgcttttacagcttacaatccagtgattctcatcatcagtacatgtggccaaaggcccctggctgacttgtaggctgtggggttgaatatgagcctctgggtggtgtggaaaatccgggaaacaggtggaaagggcagctattcaaaccctgcgagggtgccggggccatcaggttacacgtggcagcgcaggtgaactcaggtcttctcacctggggcttgtcaggtactagggacagcaggcacccagattcctctaaggagccacagggctggccaggcctcgagaagaacagtgtcaaagttcaggggaccctttctttcaccccttcaggagctgatgtccctgcagggcccccacaaagcacagccgagtttctcccactttctctgcatctctttctgccttcagcttcctctgtggtggcctttgtttttcctgcccatctttggtggctctcaaatgtcatccctgctccacagagaaaagggtgctgagtggccaaccatccagcatgagggtcccctgcagcagctcgctcaggccagggccctcccaggatgctagtcctgtgaacggatggagtctcctgcctgcttggtcaccgtgaccccggtggggagagacagtcaaggagcacaggcaggatttgtgcaaaagatctggcccgtggctcctttctcagtaggggctgtgggcttccaaccttcccaagattccccatgcagagccagggcctaagccacggaccccttggtcatccaggcccctccaaggccctgggcccaccaagacctctagccttgaagcacatggtccccagcttatgtaaaacttggcatgagtgagaaactcagcctcagtgggtgaagactgctgcctctttctggcctttcctccagcacacttcggggaggtgagggggctccagcttgatcatcagggggtgctcaggcacctccttgcataggaaagttgtttctcaccaccccagcatgggcttggcttccggaagcccttcctcctcctaggctgactcacctgcttggcgccaggacatgggagattcagagccaggggtggggtcctgcggttgtgggctgcgcgtagatggtgaaggagaatcagagttgaaatgcatagaggctctctaggacacggtgcaaatgtactggcaatccacccaccgattccaacacctgaccaagatccccggatgcagagcaggcaggctttgcctgtagccatggagaaaccaaaaccagtgggaggttcccttcccatctctgcaaacgtgctgttcccaggagctctgtctaccttgaatgccccatttctagctctaggatttgcatctgagagtgggatgtgtgtttatgaagggaagaccacagaaaataatcttttgggaaaataaatgagcgttcttccatgcttggcctgctttgacaatgcagattttccttttacttggagcttaccttctctaggctattttcaatattttcagtggatgtgagtttgttcttggagccagactacctggcttcaaagctgcttgccacttcctacctgggacctaaggcgagccgtgtagctctaggtccctcacctgtgaaacgggaagaaccacggtgcccacattgcatcatacacttgcatatgcaggcacatcctacctgcaaaaaagcaaggagcagggtaagggggcagctatcttgatcatgttccccagaagcagaccctgatttgttatggcagtgactgatgaaggacggcacccaaggagagcagtaagggaacgggggtagcagacagagaggggaaaagccatgcaagtctgtggccccaggcaaaatcctacagaagcaggtccctcgggggactgtggagtggagtcacatctctgtttcccagcctgagctaaggatacacatgtcagtcattagtgaagggccatcctgcggcagggggacacttccagctctctgcagaaaggactaagaggctccaatagcctgatgacagtctcgctgcaaagagtcataggtgtggacagttggaaaccaaggccattcaggccaggaagggggtgcatgtgaaggtgcgaggggtcacgcttctgtgacctgctggtggagagtggacagtagccacacaagacaaaagtgagcgttctgaattcagagaccagaaatggaggctttcacaaatatgcatgcaccatgctttttcatgggatagtctatctggaagatcattccaggctgcagtatgtaaagctacctcattcttctttttcacagttgcagagttcactgagtggctacgttattatggagctcaccaacctctattgatgggtatttagattgtttccaatcttgctattacaagaaaaacatgccacaataaatatccttgtactagggccatcagcacatttgcaagtgtccctgtacatttctaggagtaagttttcagatcaaaaggcatgtgcattaaaaaaaatgttgatagtggccttaccagtttatactcccaccagtaatgtgtgagagagcttgtctcccacacccacggtgacacagtgttatcacagttttggatgattgccaatctgatagttgaaaaatagtcttgaactctagtttccatttgcacttctctgattataaataaggctaaacattgtttataagctccaggaccatttctacttcctgttctgtgaactatctgttcatgtccatacttgtggaagttttttctattgaagttttatttgtcttattgattgttaggagctctttatatattaaggaaatttggatcttgagtagagtgacttgaggatgaaagcagagagaattcattcatccaagggcttcccgttcggctacctaaaactcatatccaaaccagtcctttccaggatgtggttttttacttcttcttttggttttgtgagctaacctataacctcccagcacattccttgcttgctttgccttggctagacttagccagagctgatttcaatggtgtgaggagtcttgatgtatccactctcccttaccaggttgagtctgagggtctgagttgatgtcgtccccatcttccagctgagattccctgcttttctctgtgggtccctcaacttccaggtccaggcaactagtgacccttcctagccagctcgctcaggggcgtttgcagcctcctccgccctgtcctcatgtctaggccagaggtcctgttttcttcacttggaaggtgatgtcgctgattgatttaagagcttgtttgggctctcagctctgggagtgtaggtagtgggtctcccttgataattgtgtcccagagcttcaaaggccagggccagcagggcccttggggattttggggaccaatcaccacagtggacagaggagatgcggtgcagagggggagctgtcccaggtcacacactgtgttgggggacacatgtgggtccaggagaccctttctgaatcactgttgagggttcgttctttctcttggcaagcactcctcaatggctggattccccagcttacaggcagggctgtgccatagtgagcaccaactccacatgcaaaggcaaccatagctgccctgtaggccaaggacagaggagcctgtttggggaagtggggaggtggcttggagaagatggcctggaaagactagcttgggttggggcatggcaagtgcaaaggccctgaggcaggtgagaatgagcattttgagcatggaggccacagggagagggtcccacgggcaggggtgtcgatcagagagaccatcctccaaccaagaccatgtaaccaagacctggcagaaatggaaacaatgggcaaagagccttctaggcaggggaagtggcccagggaaggccgtgcagttggaaggagccgaagcgctgcaataaagtgtggctccagactggctgggacagagagagtgagccaaagcagtcaggcaggatggcttggacacaggtgggatcctgctcgttggtctgacaggcttttattctgagtgtacctgggaacactgtggtggccatggtgtttctagcaggcaggccgtggcactgggtgagagatgtgactatgtgggagtgagcactccttccatggccatgaaaagggccttagagattgtggcagaagctttcccagtacccacaccccaggcccggccacaaggatatgggccgtgcttctggctgcctggggctttctctgcgacacattgcaccccacggggaaccgcagaaccagctccatcaccatcaacccagaactgctggcagccaatgcccgtgagagttgggttcaacaccccagctggctggccgggctggggagcctctgaggtatgttctgctcccccagggagggagctccatgtgcccacagcgctccctgtcaccccctccaccccgccaggaagggatcctcccccagggatggaggttcaggtgcccagagtgctccctggcacagcctgcctcggctctttctcttgcctgcctcacttcctgcctcatttcctgactcagcaactggtgttttctggacccctccacatacgctcagatcctcctctcaggtcgggggagcccaccatagccagggctcttcccagagacatacatgtatccccactctcaggccctagccactcgatgtcacctgatgttcctgaactatgactcccacaaaaggttgggatccatccttcctgctcaccgctgaacccccaactccaggcagagcccctgtgcatcgcagactcctggtaggtgttgttggaggatggtgaggtgggccctgaaggccagggaggctgaggaagagtccccaggccagggagagagaggctcagccagacctcctgggccaggagccctcagacctcccgcaggtgagggacacgctgttctgaacagaggctgagtgagttctgtccacagcaatcctgtcgaacctgtctggccgggtacagagcttcagggcccatatccacgctcaggggcaggtgtcctcaggcgaggaccatcaggcagctttccccctccagggcccctccctagacagggctcacaccagacttgcccagggccacagcccaggacagagtgtttggcctgtctaaggcccaatatagattccagaattcattcatggttgctgaacattccagttcagctggggacatgggacgggcaggaggggtctgctgcctaatctgatggatcttccatcctggtggggcagggggcagatgagaaccaagtgggcacacagggagatgggaactcaaggcagggggatggtggcagctccatgggcagctctgagggccaaggacagaggaggttgttttgggggagtggggaaggtggcttggagggggcggactacaaagactagcttgggttggggcatggtgagtgcaaaggtcccgaggcaggaaagaatgaggattttgaggtcctgaacagaggctggcagtggggagaaaggacatggcagcgggggtggggagcaggcctcagggccaggaagccatgggggcaaccaagtgtggttctgggggcatggaggagccaagaggagagggtgaggtggaaggtggccagactcgatttgtgtttttagcagactctgcagtcaggacttgggatctggaccacaggaagggagagcgacagctgggatgtgaccattttcactgcagggcacctgggaaggggagagggcgtgaagtggcccagacgtggctttccattggtgacctcgtgccccactctccactgccccttttcacttaacacttcaggaaacaggttcagagaagggaagggaatggcccaaggtcccttggcccagaattgtacctagacaggtgcacctggtcccagactgctctcttctcaccaccccacactgcccccaatctgtcaggtaagaaactttgggtgggaagggagaaggaaattgaaccagggaggtgattactgcctctcacacacaactgggcagcaggcgaaaggccaggcggcccagccccctatccagggtccccagagcttgttattggtatgttgtgctcacctccctgtccaggagtgagaattggctgtgtctgactccttgggaaggctgtgtccccagcctgggccctgtgggtacttagtcatctcgcaccccagagtcactctgacccccgatgtgaactgaccactgagcttcaacaaattaagggccaagtgcaggaacaaagttggatcccaccctcttctgcttcctcaagccacggcccggagtgatgagccacctccgctctgacctcacctcctcccagctccctgactccttcggcggggggcctggccagcttgttcggccactctgggctccaggctcttcaactggaaagagatgcttgtggagttcctcatggcaagtctgggcaagccagcctgacggccagcctgcgactccttgtccagaactctgtcaactccaccagtgcctgtcacggaaaccgcatggccaccagcttcaggtgacaggcctcttgcctgggtgatgagcttcccaggcccatgctatggtgtgcgctttttcacaggaagaggatcgagagcaagggtcccattctggtggtcctcagcccgcatctggcccacagatgtttaattgggctgacataatatatagttttaccttttttttttttttttttttgagacggagtctcactctgttgcccaggctggagtgcagtggcgccatctcagctcactacaagctccgcctcccaggttcacgccattctcctgcctcagcctcccgagtagctgggactacaggcacccgccaccacacccggctaatttttttgtattgttagtagagacagggtctcaccatgttaaccaggatggtctcgatctgctgacctcgtaatacgcctgccttggcctcccaaagtgctgggattacaggcgtgagccaccgtgcccggtctagttttacatttttaatgcattgccaacatttgaacatgagtagctttcacacagaaagatggctctttggctcctctgaaacactggacgaccgggtgccctgcagggccacagtgagccagaggtgggggacatgggctccagacaaatcccatgccgagcagaccatgccagccatcaacaccgcaggcctggcccttgggcattggagtaatgggtctagaatttccttcacattgtcaaaggagcctgtgacccagaaatggtaagtaaggtccgattctcaccaacaaagcaggcatgacctcagacaagtccctaccctgctctgggcctcagtttctcctttagtgaggaggtgggtgagggtcctgtcctcctccgggaactggcgatttgggaaggcagagacattcccagaatccgccggagtcctgaaaacacccacgccctttgtcccagcaatcctgagaaaggccacactgataaagctgtgggtggccagatgacagcattcttgggcctcagacgaagtgggaggggcccacccgcttagctcctcatagcccaggggagcggggacagtgcctgctggggccgtgggcagcccggtgccagcccctactggcatttcgatgatgccacaagtgccgtgccacagcagggagccgcacagtcatattttgcaaggttttgaggaaagaatgccagtgtggtaggaggggagaccagtcccctccctcccacccctctgggctccatctgaagctggttcctgagaagcacgattgtgccttttcactgaaggaggggcccccagctgtactatggacttactgacttgtttcccagctcagcctgccccggagcagagctaggcaggaccttggtgaagagggtgcagggctggcctggcctggtcatgacactgggataaggaagcctgctctcctcccaccacttccagctcacaggggaatctgaaacagcctctcctttagggctagggttgcctttcagccacagcgcctataaacccatcacggcacagtgtttgccagataaggcatcatcttgggtgaaaaatgtagatttttcatcctacgcaagtaggatgaaatccaaatggacttatggagacacagacacctttgtttcaacacctggccacaaggccccccaaaagcttctataaacaaaagggctgacagacctagctcatccggtaggcccagatcttccttgcccggggtgccatgcaggcaacccaccccgggctagggcagtggaggcttgatgaccaggtgagcttgggagtccctgggcagaggcaggtctcagtcccagggccttgggtctgctgctgggtgtgatgagttaataaggagggcatggtgtgcagaatgagctcgggtcctggccatgggacatctggccagcactgtgccccttggagcccatctttccatgggatcattagagtccttctcttgcagctgttgggagaatgaaacacaaggaaagcccaggaccagtaccaggcacagggtcagtggcgacaggtgagaccactccatgtccccagacacatctgtcctctgagcctttcaccttgggcttgccactggactatctctcaagtagaaggggctatgggcgcccctccctggtggtcagcagtggggtgaccacctcctaaggcagtgagttccccatcaatgcgcgtggcggttactgaagtggggctggggctggagctgagcctgctggctgggagaggggaaggctgcagtggctggggagccaggtccaacccagcagcctggtggccccttcccactctcagggaatatcccacaccttccctgagcactgcctctgggccaggccctgctgggaagggagctgagaataccacagactggtccccacccttgtggggctcataggctgaggctgctaagtaacatccctgtccctgtgacactcggaacaggaagtcaagaaagaaggttcaggaatcctttgctgttttcctaataccagacccatctttttctttagcatgtcaacaactcccctcccttctgcgcctggagattcctctttctccttcaatacatattttgaaatgatatttattaacataaaaattataaaacctttcaaacatccagaaaaatataaggaaaaataccaaatatccatgttctcaccacttggatttaacacatgtgaacatttgccatgcttcagatcctccttttaaaacaaaattgtatgacacagcaattgatgaacggatcatcagtacaatggactgttattcagtcgcagacaggaatgatgtgtggacttgccatggtgtgcatgagcctcgaagacatgatgctgagtgaaggaatcagacacaaaatgctgcagattgtctgatcccatgtattgaaatgtccagctcaggcaaatccgtggagacagaaagcaggcgagtgtctaccaggggctgcggggaggggatggggagtgaccacttagtgggtacagggcttccttttggggtgaagaaaatcttttaaacttaggtcatggtgatggatgcacaactattttactagaataaaaaatcactgaattgtacaatttaaatgaatgaattttctggcatggggattgtatctctctctctctctttttttttttttttttaagatggagtctctctctgtcacccaggctggagtgcgatgttacaatctaggcccactgcaacctctgtctcctgggttcaagcgattctctcacctctgccccctgagtagctgggactataggcacccactaccacacccgagttaattttgtatttttagtagagacagggtttcaccatgttggccaggctgatctcaaactcctgacttcaagtgatccacctgccttgacctcccaaagtgctgggattacaggcatgagccaccacgcctggcgagtggactgtatcgcaataaaaatgtgcattagtctactagggctgctgtggcaaaataccatggactgggtggctaaaacaagcaattttctcagagttctgggggctgtaagtcccagatcaaggtgtctgtggacagggccttctgagggctgtgcaggaaggctctgttctgggactgtctccttggcacggtagcgctgtcttccccccatgtctcttctccttgtcttccctctatgcacatctctgggtccaaattcccccccacctttttttttttttctttgagatggagtcttgctctgttgcccagggtggagtgcagtggcacaatcttggcttcactgcaacctccgcctcccgggttcaagtgattctcctgcctcagcctcccgagtagctgggactacaggcacccgccaccacgcccaggtaatttttgtatttttagtagagacggggtttcaccatattggccagactgatctggaactcctgaccttgtgatctgctcgccttggcctcccaaagtgctgggattacaggcgtgagccaccatgcccggacccaaatttcccctttttatgagggcacgggtcatgctggataagggctcacactactgacgtcagtttaacttgatgacctctgtaaagagcccatctccacatagagagagataattattgctcctgttgctgtggctactgatgccatttgggggattcgtggcaagaaggatgaactgagagcgtccgcgacattgggatccaggctggcagcatcttcctggccgtccgagagggctcttttccccgcctgggtgcctgatcctacctaccctatgccctgtggcccccagtgctaaattcccgaaaagcctggtaggcccttggtgccacgaagcccccgagatcccaagtacaaagcacaggcagaaactgtaggggcagggggagccacggcaggcctcggagagctcggggaaggccacacagctctgggcttccgcctgctgtccagaggctattagtaaggacagagcctggtgccagaggtcagggcaggtgggaagcaggagaccctgaggcaccccattcctcgagcagggctccagccaggcttgttgggaagtacttgactccatcccccatgccccacatgggtaggcccctctcccttgggtcagggccaaccacatggtcctgctgaaagccagccccctcccttcggtgaccatggcctcccgagggactcagggttgggagagcagccaggagtatctccaaaagccaggagctgactgaatccacagccagaccacttgctctctgcagaaccttcctgagaaagaacagggctcctgtctagctgtcccagagggcagccgggcccacacccctggccaggggcatccccaccccctctgatatatcaccccacatggcccatggctggctctgttaaggggcaccctcaaaagcaggctctgacatagggttggggacaagttgttttgggggacatatggtcccaggaaacaccaatagaggagggaggaggtagacctgagggagggaggccaaagtgacctatgttagtgagtggggccttgctgtgggcctggctcccctggagaccctgcagagaggcacagcaccctgtactctccctcctggagcccagtagtgggtgtcactcactaactcacagcccttattgctctgagctcccgggatttctgtcccacctctctggaggtgacaggcacaggatccctgggctgggcagggactgtctgtcaggacctcaggaataccccaagcacaggcagcaaaagcatatgcttcccccacagaggggtcaggcttgggtcccctgaagcacttctagctgtgcagctgtgggcaagtcacagtgagctgttgctgacagcaaaggcgctagaatgtcagctccctgagcaaaggggctgggtctgttctgtttcctgctttatacccagagcccagcccagggtctggcacacgcagtgcttggctaatatttgtaggtaaatgtctcgtggctcatggtgtaaatctcactatcaatcattggtaccaattcattgacacttcctatgtgccaggcacggcgctgggtgcttggcacctcatttctgctctggataatccattgttgttacagtagtaggatcacccccaaacatacacatgatgaaacggaagcagagaaaccaaggtcacccagccaaaagtagcagagatttaagccaggttccagagcctgcatttcttattcattaaaaaaaattaggccgggcacagtggctcacacctgtaagcccagcactttgggaggccgaggtgggagggtcccttgaggtcaggcatttgagaccagcctggccaacatggtgaaaccccatctctactaaaagtacaaaacttagccaggtgtggcagcacacacctgtagtcccagctactcggaagctgagacatgagaatcacttgaaccagggagacggaggttgcagtgagccgagagccgagattgcgctactgcactaaacctgggccacagaacgaggctccgtctcaaaaaaaaaaaaagaagaggaaattatgtgtggaatcaaagaaaacaagtcaaatacacacaaagaacaaaacaagcctagagatctaatgtacagcatgggaaccacaggtaagaaagttgcacagtgcatgggattcatgttaagtagattttagctgctcctgccacaaaagcaaaactacggttcactgttaatatctcagatgatggatctgttcatttgtttcattatagttatacttttactatctttatatataatatagcttttataccttaaatatacacaataacatttatttatttatttttaattaattaatttttttgagatagagtctctctctgtctcccaggctggagcacagtggcgcaatcttggcttactgcaacctccgcctcccaggttcaagcgattctcctgcctcaacctccagagcagctgggattacaggggtgtgccaccatgcccagctaatttttgtatttttagtagagaagggggtttcaccatgttggccaggctggtcttgaactcctgaccttgtgatccacccatctcagcctcccaaagtgctgggattacaggcgtgagccactggacccagccagcatttatttatttatatatgtatgtatatatttctttattttttgagatggggtctcactctgttgccaaggctggagtgcagtggtgccatcactgctcactgcagcctcaacctccccagctcaagtgatcctcccacctcagcctcccaagtagctaggactacaaggggctcacaatcacacccagctaatctttgtatttttttagaggcagggtttttccatgttgcccaggctggtctcctgggctcaggagatcctttcaccccagcctctcaaagtgctgggattaccagcgtgagctgccacacctgcctttgcctgttcttgaaattcaaccagagcctggcctttttgccatcatggtatgtggtgtcgtctgttcaataaagatcttgagcaaattctggaccaggcgtgtggacgggtaggtggaactcaaccctcatgcccagttttctcagccctaccctatggttccagagtgatggctgtgtgcacgattctgaaagctgtgtgcggtgctgctcaggagccaggaggacactgggccacactgggtgtgaatcctggccccccacttcctggctgtgtgaacgtgggccagttacccagatctcagtttccccaactacaaagtgtgagtaaggataatacttcctcctcagacagttgttgtgaggatcaagatatgagcttaaaccgggtgtggtggctcagacctgtaatcccagaactttaggaggctgaggcaggaggatcccttgagtctggacgttccaagatactgtgagctatgatcacaccactgccctccagcttgggtgacagaacacgatctcatctcaaacatttttttaaaattaatgaaaaaaagagtccatgcttagaataatcctggcattgggcaagtcatacagaagttgtttttataacatgtttttttttttctctcattataaaagtcacacgtgtgtgtggttgcaaggtcaggtggcaatgggtactctggtcctttttcctggagctgctggaccatcacagggcagagggggtcagacttcctagggcgcctcactcagctgcccttgtccgcctggacagacttgcctctgggtgtggccattgcgaaggaatcctgccccatcgctgacaatgagctgcattcttcagagaggctgccccagtccccccagctgacgtaagccctgggcgtggcaggtgcactcaggaggcagggctgcctgctcagtgttgggtggagccacatgcctgtccagggctgggtccaccctgtgtggactgaggccaccatgtgcacggttttcagctatgcctcattcgcttgctgtgtgaatctgggctgcagggcctgctgctgtgtgccacaggccagtgccctgcagtgcaattgtacctgaggacccaaggtggccagggaagccccaggtgcgacttggcaggggaagcaggggctgtggacggatggagagctgtcatgtggaaaggcagtgtgtccccaggccgtggcccagcctccaacacccccaagtcccctccaggcctctccagaccaggcccaccacatactgcctgtgcaacctcgggtgagtgacctcacctctccaagcctcaaagtcctgatccccattgggagggtgcagtcagagggtgagtctgagccccctggggcctggcaggctctgtatgcatggcagccacctgcccacactcaccccagacatctgctcattccagaaacctcctgggaacatccaccatatgccaggcatagtgtcagacaggaggggacagagaaaaacaagatcaacaaccgccctgcccttgtggagctggcgttctagtaccggagacaaaacaaggtgcttccaaggaggaagccgtgctcatcaggtaatccgcataatcgctcaggaggagacttggcagccagatggagacgccacctggggtcttaggggaacagcattccaggcagagggaactgcagctgcaaagatcctgaggaggaatgagtgcccagcgtttgagaagcagagccggcctctggacgcctgccctagggagaaggctttccacctcatttttagggtcctaggggatcccctccactgtgaatgcacgaatgcacaaggatgacatcggcccttttatagaggggaagttcttcccgtaaacaaaccaaagtccctctgggggactttgcaactgaagctgagccttctcttttagtcactcccaccccccagacccagagccagctgattcctcctgcatcctgctcacagctccaggaaagcgtcctggtggggaaagtcagtgaaacaccaggtggcctaaggtattttcccaggacctcaatgtgactagacagggctagcttatcaaccctgggatgcgatgagaggggcaaagcccggcaaaagaaactggacccagggcactgagggaagcctaggtcccgtctgagtgctccgcacagggataggaggagagacagtcgggggttttgtgagggaggggataggtgggtggtagtaatgaggggtgttcaagtcagtgcccagcaaccaagaggaggaaggaggtagagggggtgtcaagcaagccgtagcttcaggcacagctggatccataaccctgaggcttgggctatgatggctgttgcccaacccccactcccatatcacccaggtctcagtcaccttcctctctgtgacacaacagcctcctccctagggctccttccttccactcttgcccccacaaatccattctccatatattgttaaaaccatgccactctcctgcttaacccctccccccatggcttcctgacgccctccacataaagcagaaactccttacccaggccccagagacccccgctgacctccccaaccccacctctctctcctctcccctcactgcctctgtcctttctgtcccttgaacacaccaagcacatccccacctggccagcattgcacctgctgtcctgtcccccgggtgcatcaccatgtggccgccccttctcagcaggacagcctagatgtcgctgtcctcggccatctggcccccagccttctgtccactccccacaccagccctgtccggcagctccttctgtgatggaagtgctctttgtccactgtcaccagcctctgtcagaagctaccggccccgtgtggctaacaagcccctgaaatgcggctactgcaatggaagaactggactcttaattttcaattactccaattacttgaaactcatatagccacatggggctagtggccaccatttggacagagcgactccaatgttctacatggtgtaattttatttactagcccttagcacaaagtgacgtgatcttaacttcacttgttttctgtctctctgacgagagtatcagctttgtgaggtgaggattgcctccgtcttttccactgctgtatgccggggcttagtagtgggcctggcgtatagtagatgcttaatatgtaattgctgaatgaatgaatgaatgaatgaatgaatgaatgaatgcatgcatgagtgaatgaatgactcctggggccatgaactctgaatttctccaaaaggaatgctagttctgccggggattgttgctgtgtgacctaagtcaggatcttgccctctctgggctcagcatcctgaccaaggggtaccagggcccctctgctcctaaggctctgagacttcctgctgcttactctgtccaagctgccccgtctatccttcatccccgatgcccacccccagtctccccagccacttcataggaaaggggccagacaggcttcctgtccctggagcctgtgtctagagagccatcaaagcaggctgcctgtacccgtctcctagcaacaaatggccttaggaagtatttgagggtgggataaagtggtggccactgtggggctgtgtcccaaatcgacagctctccagttggccaagggcaagtgtttcccaggagccaggccaaggcaggctggcagtcgtggtacatgcaccaggagtcggctccagggtcctccaagcctgggccctgcagtcggccacccttaccttctcgtgcctgtgcttggggttcagaggtggcagggggtgcttgggccctacatgcttcttgtggggacctgtaggaaccaggcatgaggaagtgaggagtgggtgctgactgtcagtgactcgaaccctgactgccccagcatccaacactcacacgcatgcacatgtgcctactcagccggacacaacacacaactatgcatgctgacacgcacttgtgcagaggcataggcacagactgcacttaccttattctatttattatttttattttatttttagagacaagttctcactctgtcgcccagcctggagtgcagtcatgccatcctagctcactgcagcctcaatttcctgggctcaagcgatccccccgcctcagtctttcaagtagctgggcctacaggtgtgtgccaccatgcccagctaatttttaatttttttgtagagatgaggtctcaccatgctgtccgggttggtctcaaactcctggcctcaagcgatcctcctgcctcagcctcccaaagtgctgggattataggtatgaggcaacttgccaagcccaaacatgcacatagatatggacacatggacctgcatatataaaacagacatgcaaacatatacagctcaatcagacagaatacacacacacaatgacactcacagacaatcacatagaagcccagatatatatgcagtggggccagccagatagcccagttgcccacaaacacacataaatatgtaccatcatctcacagatcatatgacatgcaaagatggatgcatctgtacaattcacacacatattcacaagtcagagatgcaggtcagacccccagataaacaggccaacatgcatgtagacacataacatggtcattcccagaaacaccctcagagatagccagaccaccctctggacatgcacagacacagacacataaggagatgatatatcaatgactcttacacacacccacgagtcacagcccctgaagtgatatggtgaactagaagtgtcagcccccattcctgtggactctgagcaaacctccactccccagcctggccacacgcaggcacgcaggccggaagagctgccgcctctccctgccccggccagctggccgtcctccaggcttggtgcagatggtggggccagggcagggacagcccagcctgtggcctgtgttgcctgcctcttgagtcccaggcctcttcttcttggctgtgggaccctgaaggccccctccccacagctgagtaggccctgacaatttgtgtaacaacctcgatttctgatttcttttggaaaattaaaagatcgatcacgaccaggcccaaatcctgtaggacagacggctacgaccgaggccatggagctgctgcctgttgtaggagcatggacaccccagatcactgaggccactgctgccacctgcctggccctagaggcctctgagtgtgcaaccctggaactacatgcttccctgcatgtcctgaaaaagaaaaacatgtcaatccagagagcagattactacaactttcttggctctttgtttagtgatacttatcaagagccttaccaatgtgtttatcttttgacttagcaatcccaacccatgaatttatcctaagaaaaaaaaaatttaaaaagtacacaaacattgttcatgaatggctagatacgcacatacgcatacatatgcagccctgtgtccctgtgtgtatgcacatgtacattatatatatatacatatatatatatatatatatatatatatatataattttttaagatgaagtcttgctctgtcacccaggctggagtgcagtggcgccatctcagctcactgcaacctctacctccccggttcaagagattgtcctacctcagccccccgagtagctgggattataggcgcacaccgccatgcctggctaatttttttgtatctttagtagagatggggtttcaccatgttggccaggctggtctcgaactcctaacctcaggtgatccgcccaccctggcctcccaaagtgctgggattacaggcatgagccaccgtgcccagcctacatgtgcatatatacacattcatgtagacatacaccttgttattagagtttttacaaatacggtctcattcagcaaaaactatgtgaggccatacatactttccccttaatatgttgtgaatacatttctatactaataaatatctacaccctgattttttgaataatttttgtttagtgattttagatttacagcaaagttccacaaagttcccatactcttcccccaccttcccctaatgtgaacatcttacataatcatgctacatttgtcaaaactaaaaagttaacattagtaaaacattattagctggacgacagactctattaggatttcgccagtttcccactaatgccctttttctgttccatgatctcatccggcatcccacatggcattcagtctccgtcatctcctgaggctcctctggtccctaacagttctgagtcttttcttgtttttcacgaccttgacacattcgaagagtgctgctcacgtattttgtagaatgcccctcatctgagtttgtctgatgtttttctcatgagactgaggttattagtttttgggtaaaagatcacagaggtgaggtgcccctgtcattgtatcagggggtacccagtagccacaagacttaccaccagcgatgttgagggagcatctgctgagtttcttcactgtaaaaggactgtttttcttctttccatagtccattagaggatgaggatgaagttctgcctcttggaagcggtggttatctatgtgtattattagaatctgattttacatgacagaacaatgtttcattttatggatctgccctcatttatttagccagtaccctaatgtcacacacttccatgactttcagcttttcttttacaaacaaagctgcaaaccacagcaggagctcaacttcaaattcaaaaaaaattgtggtttgtttttttttcttttgagatagggtcttgctctgtcatccaggctggagttttagtgatgtgatcacagctcactatagccttgaaatcctaggttcaagcaaccctcctgtcttggcctcccaagtagttagaattatgggcatgagccaccatgcctggctaatttttaaaaaatgtttttgtagagatggggtattgctatgttgctcaggctggtctggaactcctggcctcaagcaatcctcctgcctcagtctcccaaagtactagtattacagatgtaagccaccacatctggcctcaacaaatagttttcaaacaacttctctgtaacagacactgcacactctagtgaacaatgtttgtatacctcttcaatgttcttttttcttcttagaataaattcacaggttgggattactagggcaaaaggtaagcacattgttaaggctcttgataagtatcactaaacaaagctccaggaaacttgtactaatctgctctttggattgacaattttatctttttcagccttttttttcttattacaaaaataatttctgtttttaggagataactggaaatcactcactgggcatttaatgatattaaagaattattgtttttttaggtatgataatggtattgtggctactttttgaaaatagttcttatcttttacagacacacacagtagatgagggagtatggttgaaacaagacttgtcctgagttgatatggaagctgggtaatggatacatccaccttcattatatgattttctctatattagtaagaaaacaaaagcttttattaaaaattttaaacatgatataaatctctagcttaagtgtgagtccccattctttcacctcccagggttaactgcaatgaacggttaggtgtatgtgcccctgaccttctccatgtaaacactaactgtgaatattgctaacacacacactcttaaaacaaggatgagctactacaatgcacaccatttctccaacagcttttcacttcaccatattttgagatggatggccacgtcaacactatctcagtctttaacaactagccccatggtactcccctgtatcaaagagccataatttattcatccgatcctctaatgatagacaattggagtatctccaatttttgctattaagaacaatgatggaatgaacatccttgtacataatatctgtgtacctgtgtgagcaattttacaacctatctttctagaagtggaatcactatgtcaaagtggtcacagacttaaaatttaaataacatgtccaacttgcccttctggtggactttctgtgtcaagtgcactacattctctcctagtgcacatctggagactattgtcatttggtgcctgctgtagaaaagcctcatggcgtcacagctggaaagggcctccgagatcttgtggtcttgcttccagggaagggtggggcccagcccccgatgctgtcagggccacgtgcagctccctgggctggaggttgtgtagagcagtgctcacgaagatactgcccatgtctgaatcccaggcttaccatttactgttgtatgaccttgaatacttgccttgtccgtgcctcagttttctcatctgtaagctgaggataatactaattctggggtggcaactggaaaggggttaggagatttttcttgaagctacattaacaaagtatatatttatttggggtggctttcaggggattgatggatgatggggggtgggcactaaggactcccatcagacaccaccagcgctgccagagctaatttcaaatgatgacagctggacttagtgagattcgacgtgacgaatgcccagcacacggcacacagcctggcacactgtcagtgctcgatggttgtgaattcttgaatgctgacaggtgctgtctgggacagggagaccaacatttcagagagactgtccaggagagggaggcccgagcaacaggaaaagaggggacccaagaaacagcctaatccagcccgccacttactacttaaataaagtttgattgtaacacagctgcgccccttcattatgtaatgtctatggatgcttgcacttgacaatatcaaagctgagtagtttcgacagagaccatatggcctgacaaggctaaaatatttagtatctggccctttacagaaaaaatctgccaacccctggcataggggttataggcatactaatacatgctgatagttcttgagctcacaccgtgtttcagggactgttctaagcacgtcacatatataaatttctttagtcctcacaatactcgtatgacatggctactatttatggtagctagtctcaatggtggccccagtgaaccacgtctcctggggctgacgcctctgtgggccccccacctcgagtctgggacatcctgtgccgtgtgctgactaatggcatgcggtcgagtgccaggcctggcattaaggaggatgggtacttctgcttctttgctctggggaacactgaggtgctgcacgcagagcagaaggggaagccatggggaaaggagaggctctgaggctgcaaggaaaggacgaaggtccagccagccctgtctcagtccagcctccagtgacctcacccagctaccatgcagccacacttacagcaagcaagaccagcaggactgccgggcagagcccagtccactctcagaaccagagagacaagaaaatagtgctcaagccactctgctttgtggggtggggtggttctgcagcaatagctggctgagacacaccacaccagagccttcgcctttccaccctcctttatccagtggttccaactcctgtgtggttatgagaatcctccaagtagcctttacagacaccaattaaatcagaatatctggaaatggaccagaataggaatccttttttttttttttttctgagacagagtctagctctgtcactcaggctgtagtagcactgtggcacaatctcggcttactgcaacctctgtctcccaggttcaagccaccctagtagctgggattactggcctgcaccatgatgcctagctaatttttgtatttttagtagagatgagttttgccatgttggccaagctggtctcgaactcctggcctcaagtgatccacctgcctcggcctcccaaagtgctgggattacaggcctgagccaccgcgcccagcctccagagtaggaatttttttaatcctccaggatttgagaaccacagctccacccactatttccaaaacttgcctagcagaaatattttaaaaacagattcttcggctgggcacagtgactcatatctgtaatcccagcactttggaaggctgaagcaggaggatctcttgagcccaggagttcgagaccagcctgggcaacatagtgagaccctgtctctacaggaaaattagcaagcaaggtggcacactcctgtagtcccagctacttgggaagctgaggtaggaggatcacttgggcctgggaggtcaaagctgcagtgagcccagatcacaccactgcactcctgggcgacagagtaagaccctgtctcaatagcaatgacaaaatagattcgtgcactccaacagatacacaattccatgggaggccctggaaacctgtagcattcacacattcctccagatgaattttattatcaatgattagcagaaaaagggcgagatgagagcccagctctcaggtgtggagaactgcttggcagtttcccatcaggttaaacattcacttcccaaaacttagccatccctagtcttgggtattcccaatagaaataagtgcttggccgggcgcggtggctcatgcctgtaatcccagcactttgggaggccgaggcaggcagatcacgaggtcaggagatcgagaccatcctcacacagtgaaaccccgtctctactaaaaaaatacaaaaaaaattagccgggcgtgatggcgagtgcctgtagtcccagctactcagaaggctgaggcaggagaatggcctgaacccaggaggcggagcttgcagtgagccaagatcgtgccactgcactccagcctgggcgaaagagcgagactccatctcaaacaaaaaaaaaaaaaaaaaagaaagaagtgcttatgtccaccaaagacaagcacgaagatactcgtagcattattcataatggccccaaactggaaacatcctgaatgtctatccacgggaacatggacagataaattgtagtatttccacacaagggactaccaggcagcaatgaaaaagaatgaagtactgatatatacagtagccgtgtggattgaatttcacaggcatactgttgaatgagaagagccaggcatagctcgcagcggattccactcatctatggtgatggagatcaaaatagtggttacctctgggtatctgtgtgtaaattctgctccctaacaggacacagggaaaacttcccaggatggcagtcagagccacaaatcaagacttacctgcatttggggctcacctgagcggccttttcttgcttgcttgcttatttgcttttttgagataaacaatatacattgaggtgtacacaatgcagtgaaaaaagcatacagcccagtgaatctttacatgtttacactgagtattgaacttcatgcaaagtgctgttctaggcccctggaaagggaagccaaggttatgagacacagactgtgtcggtatggatttcataatctggtggaggagatattacaatacaaggtggaacgatgacttttcatccattcacccatggggtgtttttcttgtttgttttgttttttgagacagagtctcactctgtcgcccaggctggagtgcagtggcacgatctcggctcactgcaagctccgcctcccgggttcatgccattatcctgcctcagcctccctagtagctgggactacaggcgcctgccaccaagcctggctaattttttgtatatttagtagagacagggtttcactgtgttagccaggatggtctcgaactcctgatctcatgatccgcccgcctcggcctcccaaagtgctgggactacaggtgtgagccactgcacccccatggggtgtttttgagcccctgctctatgccaggcactgaactagacaggggaaatggagtagcaaccaagaccccactctaccgtgagggttttggagaggagcgcaactaattgattctacctcctaaacattttccaaattcattcccttgcctcccactgaccctatcctagtcaggctgctaccctctctcctctgcagctctctcagtccttgcccctgattcattctccagatcagcagcccttacctaagtgctcagccgaaaaaaattcaaaattgatgactgcccctggcccaggcagctccggtgctggcctgtgtgggctcaaatcttcacttgtaggatctataattgtgaccacaggcaagttcctgatatgtcctgagcctcgtgtgtgtcttctataaaatggagatgaaatagtattaacaacaaaaaccatacctgtctccctgaagaggctaggcttgcaccatccactactcctcccagtgcctctcaatgctggtcactcctgcctctctgaactacccagtgatagaaagctgcttctgttcatgaacacaccctttggtttcaaggcctgagactctataattggtgccccagtttgacgtgtctttcccttcaccttctctggctgggtcttactcagctccagactcggcctaggcattgcctcctccaggagccttccctgaagctgcctacggggctgggtgcccctgtgtgggcccccacaacaccccggattgaacttctctgtctcctgtttctgtttgtctccacttgcttgagtgtgggctcctgccgggcaggctgcctctgagttgctgaatgaaactcttctttgcgcccctactgtggacccctccagtccagtgcaggtgctggatgtgcctactgacctgagcagaacatgctgagcactttaagggaggtggccttgaggaatgggcaggacatcaagaaagaaaatatatatatatatatatatatatatgtatgtatatatatatttttaaacaagttgtacatgcagacaatactaaattcagcagaaacaaaagggattgcaatgaaaattaaaagtaggtcacctctcaaccacccagctcccctccccagtggccacctcttctatcagtttctgagtattctctgcagggcagaattgtcagtcttccgtcccttttttattttgcaaaaatttaaagcaacagaaaagttgcaagaatagtacaataaggccgggcgcggtggctcacgcctgtaatcccagcactttgggaggccgaggcgggcggatcacgaggtcaggagatcgagaccatcccggctaaaacggtgaaaccccgtctctactaaaaatacaaaaaattagccgggcgtagtggcgggcgcctgtagtcccagctactcgggaggctgaggcaggagaatggtgtgaacccgggaggcggagcttgcagtgagccgagatcccgccactgcactccagcctgggcgacagagcgagactccgtctcaaaaaaaaaaaaaaaaaaaaaaaaaaaaaagaatagtacaataaacaccttttgcctagattcaccaattaacattatgctacttaacaagcattatatcatttaatgttcacattaattaattaatgccaattttgtacatgaggtcactgaggcaccaggcaggttaagggacttgcccgaggccacagagctcctgcctggtggagctgggctttcccccttaggctgccaaaggactttgatctgccttcccacagctcccttttgaggaaaagcattttcttacactaagttgaaatccacctccctgggatatttaccagatgatccgtggaaaagtacacagctctggaagcatttgctacttctcctcctaaaacctcctccattccctgagcgacagctgctgtggctgccactaccacatgctccaatgtcacctcctccgtgaaggctgggttagctcacccccctgtttaaagactcaccatgactcccagctgccagtgggatgacatgtgcacgcctgggcttggaatacaaggcctgggtgatagagccctcttccaatccctcttgctccttcttcccctatctccacttccagccacactcaaccctctcactgtccacttaaacttcccctcctccttgaagccacccgaatttttctaaagagcgcatttctcccctctctgggctcctgcaaccttctgcctgagcctttgacagccttttccaggttgtcttttggccaggaggctggacaatggaggacgggagtgacagctcggccccttcctagcagagtgatcctacacaaattactccaggtgtctgacccttcatttcctcaagcacatcatgggggaaagaatgcctagctcagcacctggcagagagtcagccttcgctcatctcccctaatggagctgacagctcttcaagtccgctgacatcttctcttagtcatcccttgaaatactacccgctgttacttctctgctcctcagtctcctcctatgtaaaatggggatgagaaaggagaggttgcgaacctttaatgagcgagcccttggagtatccagcccttcccgacgctaactgactcctacgagggggcctggtacacagtaggtgctaaactaatcctctccgagctgggcttggggaagatgcctccgttgggtgtacagcgtgggcgcgggaaggcgagcctgggagcgagggggttgcagagaggcagcctgaggtcggctccgccttcccccgcatcccccgcccgggccctgcagctgtcagcccggccggcctcggcgccagtccaccaaacctgaacgtcccatgccggcgcccccaccttcccggcctgcacaacttaccttgcgctcggcggccctcggtcccgcccccgactgccattggcccagaggttcctttgttagcgagagcgcgccaaccccattggccggtggggctgccgatcgcgtcgggcgcggccccgccccgtacgccccggcacctccccgcgcccggccgcccgcccgcccgcccgcccgcccgcccccgtagtgcgtgaggcgctccggtcccatttgcagcggccgcggggcgccgagggcagctgcggcggcgcggacgagccgggacggcggcgaccggagcctgagaggcgggccgcagcgggaagcagcgggcccgaggccgcgtccatgggcccgcggcggccgggcggcggcggtgcgggcgggagctgggcgtcgcgcgcgctgtgaggcccgggcggctcaggagcctcggcgcgtgcagcgaaccgcccgccgggaaggaggccgggccgggcctgcggcggggccggcgagggatgcggcgcggccgcgctgagcccctagcccgccgggagcgccaggccggccaggcctgcgccgccgccgccgccgccgtcgccgccgcgccgaccatgtcggcagccaaggagaacccgtgcaggaaattccaggccaacatcttcaacaagagcaagtgtcagaactgcttcaagccccgcgagtcgcatctgctcaacgacgaggacctgacgcaggtgagcgactggggccggcccggacacctccgttctgggagccgcgggtcggcggccggggcgccgccaagggctgcagggaaaataaaaatggagcagggaaatgcgcgagtcctggggcatggggacggggacgggaagtgcattgacagagctgggacaaagggaaaatcctcgagtatgccgaaaaataacatcctttcccgttcccattgcccggctgtgtgattcatgctttttgggtgactcaaaagtgcctggtttcgcttagtaggaacaaagcgcttagggattgcatgccgcttgacgggacccccctgagattctggcttgggactggacttggatttgtccagccagagtggcccaggggtcggattgttggggaggactgtgggcttccgtctagtgggacgcagcctgccccgattctgaatcatcgtcactgtcaagcactggagagaggtgaaggggtgtccaaatctggcgaggagggtcttgttcttgaacttagtttggcaggccgtagtttagcggggagctgggaccagttccctggtcactggccgaggggtgaggagacctgtgggtcctcgggaaagttgatttctgtctcccagccttaactgtcaaacagggctttgaactagttatgactcccaaacgtgcattagagtcatagccattaaacacagagttctggggcccccgccctggagtgactggggagatggggaatttgtattgatgaaaggctccaagaggcttggctgcagcccccatggcccttgggaacccctgcagtgattgctgtttgaactcctagtgttccaggattccgagccttgtgtgcacctccttgggatgtgcctcggtaccctccccacggccatcatctccatcctcttcagagctttctctcagcctcctgaatgaagccaggggaagtcccttcacattccagtccagtgtgacctagttgtagccactcctgtcgcagaagaaccccttagactgaaaacgagtgaacgggcctggttgtttttaatgccacttcagtgcacccagggtttgacttgtttacatggccgactggagtagggtggtggggcaggggttacggcctggggcacggggcctttctctgaggtcaggtttccaactgccaggaaaagattcctttcatctaaaccccaaaagcttaacgaaacactcaaggctgcaaagtcatagatggttaagataccaagggttttaaggacggtcagcttgggacggatagaactcatttacctcggagggtgttttggagtgtaaaggagaacttgattccttcttctcatctggatgcttttttggatgaaacagtttatgcgatgaggagttgttaggagactttgcttcaggtcttggctgtcacttccagctgtgtgaccttgaacaaatccctttacttctgtatcttttaatttccttatctgtaaattgggaatcctggtccctggcttacctccttcactgagcatttgtgaaaagcaagaaatgatattttatgaaacttttttctcttacaatttaacaaaccaaaaaaacctgccactttaagaagtttctgggcaagggttgttctgagagaggtttgtaagtttcctggttattctaagcaactgtcaaaattggtaaatttacacctcataggggctgttttcgaattcttaagcttagataaactaggatggaatctgcatgtttgagtccaatctgctaagattttttttaatctgttgattattaattggattcacggggagaggcaaacttaaaatactgtactctcactgtattcaaagttgaattgtgggttttgaaacaggcctgagaccttcagggcacaactggaatggtagtttctgaaataatgagtggggttatttgtgctgggagaggttagcccagcattctacctcctgggatctttcaggaagaaactgctcttgaaaagagaggagggagactcagggctgttgccaacagccttctctgctgctctctgcatccggccctccctctcactctcatccttatggctccattagaaaacctcaaccaatcggttcccatcagtctcccccaagcccctgcttcctgctgcccctcccagcctggagcttattttagaccgtcaaagctggaagatacatcagccaccatcgaggccactccctccttaagaggagaggatactgggcccagggaggtggtgggcagccttggccggcttttgctctggagatgtcatcttcccaggagcagacatttctctgagccttttggtttgaggtttatttcctcagctgtgggttttgtttgtttgtttttcccctagagaggcacagaaacctcttgcagggactgtattatggcatcagacctggaagggacttggagatcagctaatgtaaccacttcctcttaccggtgagaagattgaaacccagagaagggaagtgacttgcccagttcagggatggagccaggattctgaagccaatgttagttcccctactcctgttcagggtctacagtggccacaccatgagcacatgatgaggacaataatgtcagggatagttatgttgcaggaggtgccttgagaatgctggcttggagcagtggagttctttgccttttcctcctcacggaaatttggagtaatctgggataagtgataagtgaccgtcctttattacttgttccaggcccctgttcacagagtgtcatttatcctccagttttcctgtgcatttctcagcgacatacggacccaaatatacagttttttttttttttttgaggcggagtctcgctctgttgcccaggctggtgtgcagtggcgcgatctgagctcactgcaagctacgcctcccaggttcatgccattcttctgcctcagcctcccgagtagctgggactacaggcacccgccaccatgcctggctaattttttgtatttttagtagagacgaggtttcactgtgttagccaggatggtcttgatctcctgacctcgtgatccgcctgcctcggcctcccaaagtgccgggattacaggcgtgagtcactgtgcccagctcaaatatacagttaaacctttttatcctgaactgtgtgcatgtatttgctctgcgacatattttttgttttctgcttatcagcatatctttacgttcttttcatggtgttgcatataaagatgccagaaccattttgcatattaggcctttaggagtgtactataatttaacccgtttccttattgatagacatcaaggttgcttatgggttttgctgttacatacagtgaatgtttcggcaaagagtcttataaatacttctgggtgtgtgtgcgtgcatgcatgaatgcaagtatttctctgggggcagatacctataaatagaatggctgggttgacatcaagcgcataaattttttttttcagataccacgaaattgccttccaaaaaaggctgtgtgataacatttccaggactggatattatcaaatgatttaattctctaataattttcctaattactcatgaagttgagccttttttatagtatttactgagtatttttgtttcttttgtggattgcctgttcgtattgcttgcccatttttctgtaaggttagtttttcccccagttgatttgtaggagctttctataagtgctttaggtcaggggtctgcaaacttttttggtaaaaggccaaatagtaaatataatttagtgtctgtgggctatatggtctctgtcacaactgtgcagactttgccgtctcatcacaaaggcagccgtagacaacacattaacgaatgagttcgaatgagttactgtgttccagtaaaactttatttaccggcagggcgcagtggctcatgcctgtaatcccagcacttagggaggctgaggtgggtggatgatctgaggtcaggagttcaagaccagcctggccaacatggtgaaactctgtctctactaaaaatacaaaaactagctgggtgtggtggcacatgcctgtaatcccagctactccttgggaggctgaggcacgagaattgcttgaacccaggaggcagaggttgcattgagccaagatcgtgccacagcactgcagcctgggcaacaaagtgagactccttctcaaaaaagtaataataataataaatttaaaaaactttatttacaaaaacaggcagctggcatgatgtgtggcctgtgagccatagtttgctgaccctgaactagatattaatccgatgcttgccacgtattgcaggtattttttcccagaatgccacttgtcttttttgtgtggttatttttctttttcataatataaatgcagttggtctttttttttaatagtttgtagttttaatgtcatgtttaaggcctactttccaagatttgtaaaataatttctcatattcttttatagctatttttatacttagctttttaatctatcagacttgttttttaggaaaataattctggttaaaggcagaagatctactggaggctattaaactgggtaaattacaatcaaggcattctctccagatcagtgctggtgaggatggaaggaatcagactctagggacaggatgttgttggttgatcagaggtgggtgttgaggaacctggggtagttagaagtacctttaacagagattgagaagaacagatttggagtaaacttgggggatggggaggggtaaaaaataatatggtaagtttgacccttatggacgtagagggaggctgggttggaattcttaagtcttggatgtggaggtggttgctgaaatcatgggagtgagtgtgagcactcaggaggctgcatagagtgaaaggagaggaaccagcctaggaagcccccatgtagtgggcaggcaaaaggggagcaggtgcagaggctgggaggtgaatcagaggggtgggcattagtgggagaagcaggtctggaacccagggtgctcagcttctacatccgcgtgttgatctgggggtgatgtctctttctcctgctgactgtgtaacttcaggcattgcctctgtggaaggagcctgcaagcctgtttctacttctttgtctagccctgtttttttgtgggaccttggctgggtcattttcattgctcaggcctgttttcccatctggaaatgagctcggtcttgatctctcccagggttcttagtcttcctggtgtgattctgcccttgctgtgcccataccccactgccaaggctccaaagctgcgggggcctcaggtgggaatttcagacatagagggtgtgggccaggacgaggtctcagggaagcatttcatcaggtttccctttgttcctgtagacattcgtagaagttctaaggcataggacttcctgatttgacttaatgtgtatctcagaaacaacggggagatttcgcatcccccccttgtagaagatctgtaacaggagttggtgtgttgcttggcagggagcgtgtcaaaaatctcagacacacaaaatcccatttcagacggccaagcaccatgacaaatgctcagcgttgtcatcagcgaaacccaaattgaaaccacagtgagatatcacttcatacctgtcaggatggctagaattaaaaaaataagaatataacatgttggcgaggatgtgaagaagttataactcttgcacgttgctggtgggaatgaaatggtgtagctgctgtggaaacagtttgggggtttctcaaaaagttcagcataaaacctaccacgtgagccagcattcccacttctaggtatatgccaagaagaattgaggacaggtgtattcaaacagatacttgtatacaaatgttcataacagcactactcacaatagccaaacggcagcaacaatccaagtgtccatccactaatgcgtagataagcaaatcatagtgtatccataccatggaatatcattcagttctaagaaggagcgaagtactgagacatgccacaacatggacgaacctagaaaacattgcgctaagaggcagacatgaaaggtcatgtgtcacatactgtgtgattccatttatgtaaaatgtccaaaacaggtaaatctgtagaaacagaaagcagatcggttgttgccagagcctgagggttgggtgggcaatgtggaatgactgctaatgagactggggttctattttgggggtgatgaaatgttttggaactagataaaagtgctggttgcacagccttgtgaaatgtactaaatgcccctgaattgttcacttccaaatgcttcttgacttatgatgggacttatggtgggggtacatccaggtaaaacccatcagacctatcacaaagtcaaaattataagtcagggactgtctgtacaagaatcgctctctcacacacacacacctgccttctgctccttgtgtcacctggagtgaatatctgattgtttctagagtctagaccaaggcttggcaattttttttataaaggactcttcttttatcctggggaactccttccccaagccactctttcccacctgaatgacacagttggaccaggtcggtggttttcaagctttcatcaaatcccggagccttttactcaaaagaaatcttgtatattttaggttttgcaggccaacaggcaaaatcgaggaggttgtgtaggatatagccacttaaaaatgtaaaagccattcttggttttggggtcttagaaaagcagctggtgggccaatttggcacaggggcacagtgtgccacccctcagaccagccctgtcctctagaactgtaatggaagccacataggaaattttaaattttccagcggctacgttaaaaaagtaaaaagaggggccgggtgcagtggctcacgcctgtaatttcagcactttgggaggccgagacgggcggatcacgaggtcaggagatcaagaccatcctggctaacacagtgaaacccgtctctactaaaaatacaataaattagtcggggccgggcacagtggctcacgcctgcaatcccagcactttgggaggccgaggcgggtggatcacgaggtcaggagatcgagaccacggtgaaaccctgtctctactaaaaatacaaaaaattaatcgggcgtggtggtgggcgcctgtagtcccagctactcaggaggctgaggcaggagaatggtgtgaacccgggaggcggagcttgcagtgagctgagattgcgccactgcactccagcctgggcaatagagtgagactccgtctcaaaaaaaaaaaaaaaaaaaaagaggtgaaattaattttaattatgttttatttaaccagatatatccaaaatactgtcattacaccatgcaaaaaagttatgacgtgcgcattttacgttacagcacatttcagctcagacgagccactttcccactgcttagtagcctggtggtgtggccgctgcccgcagtcctggtggcagccctggggtgccacaggtggtggtgagtttcctccgtccctcccttgggccttgggttggaaggttcctggagtgctgcttctctgggacttgttactcctgtttgtgtccccactcctccttggcccttggtgtctattgccaacttttgaagtttctttctttgactatcacatctttgatggcttcttttggtgtgttagaagttctcttctgggctctgatccccactccctgcccagaggcagagtttaggggcagaagggaggaaggtccttgccagggcctcaggcctgtcctgtggggagccggtgagggccgtggtgggcaggctggcgtatccccctctaaactggacgtgcaatgttccagtattatgtaattgcaccctagcttttttccctgggttctagcctgttacctgatcttttcctctgatttctctttcccttgccacacagaaggactatagtccaaggcctatgttctcttcctgacacaaatgtgcagggtgacccaggaaggtgacttatgtctcccacctgtaaagcgggtgcctgccttctctttgcagagtagtgtgctgatggaatggggagttcctgagccccccatgtggtgagggatgttccaggaagcacgctggctgccgcctctgggggaagtagcctttctttgggcaacctcatgttctttagcagaaataaagaaatttaactcagaatgtttaaattgttcccaagctgccacttagtcttgaaagagggagagagtgtggcagcgaggcacaggggaagacatcctactactggacatggaggatcattgggtgctaatttggaagcatctgacctaagaaaacgggctcttctcttatcctgggaaactcattccccaagccactctttctcagctgaatgacaccgttggaccaggtggatggttttcaagctttcatcaaaagcagtgcagctctgggcaaggcagccaaagcctggagcttggcctcccatcctggggcggggtggcgggggagggccttgggtcatctctggggccatttggggcaggttcgaaaactctgccctagattttgtgctttttccagttttagcaattgaggcagtcttacagctgctctggaatggagcccccatgccctacccagagctctcaaggcattgtcacttccgttgggggcaagagcacctagggggttgattcactgacattttgtctctggaagctggaactgaaatcttccaaaccactcactggttttctcagtcagggtcatcctagttcacatgaaaccacagcctggtttttgcctggagcctgtaacccttctggctccttccccttgggcgcagcttggcggttgcatgctgtgccagaggtggccctggtgtcagagctgctttgcagcgagactctgagtggatgggcctgccggatcctttgaacctctacctactatattgtgtcatagcccgtgatttcacacagacctcagcaggcaagggtggccagcagggctggtggcagcaaggcctccctcggaggaggggaccctgagttttcagagtggttgagcggcctgcccaaggtcactgagctgctcagcaatggggccgtgatacagatttcagctccatgaggctcccgtgccagagtccaccctggctccagactccaccctggctccagactcatcctccctgtccttgggaaggccactttgctttgtaaactccttagtgtttttgtttggccccggggcagatgggtagtagggagattggtatattgcagtgctgcagaataaatcacagctgtttcctggacttctagttcctagccctgggaagagggacctgctggggctgtctgcacctgccctccctgcctttcccccacattatgcaggtgagggattgtcttcaattagcagatggagccgccgagacctggagaggttcagcagaggttcagcgacctgcctaggtcacaggaagtccagcacgattttttccaaagtcctgtttggccaccttgtctctaataagtgttaacctttgctatcaggaacagggccttgccccaacttggactccttagttcttgagtgtgtggtggggcgtgtgtgtgaacggtgcaggctgttgtgcagggcatcgcccagatcttcacctctcctcagcctcggggtgccccacatccccaacatgggctactggcctaggcagcagccacacctttggcacagctctgaacaggaagcacaattttttcctctgaaagaggaattcagaatcaggaaatagctttgtccttgatctctgtaggttctgaggcactggatttaacagacccacaagcaaccgtggcgcactttccacacaaggtttctgacctcctcgtggtccttcccatagataaaggggccaagggaagggggagcagctgcagggagccccagctgagccagagaaaggggccatgtctcctgggtctcctgatgccatacccagagcctcactatcaggactgggtgagccacttgaggctcaggagcctcagggccgcgggaggggtgggtcagggcatttgcatggcttctgcttggggacctgctctgacctagaaatctgacacagtcccacttttcatttcagtgcgcccaggcaagggaattggaatggtggcgagcccagatttgagtttccattctagctccattttccatgctaatggagcaagttacttagagctgaagcatctatgcccctcatctgaaaactggggggttataataatagtacccatggctttgggtcctgatgaggatgcaggaagatgcttccaaagtcctcagcaaccgcaggatctgtggcaagggcagagtttgtaaatactgggttatatggtgggtgcttagtaaatggggtccgttttatcagcaataaaccatgtagtatggagctgtgtgtgggacacggatcttgcccttgggaagctctcacttagcatgctggcccatctgctcttgaatgtccaccatgggccaggccatgggcgagatggggcaggggcagtgcggggagcaccaggtccccatccctcttaggttactgcagagaaaacagcccagggaggggaccttccactgtgattttgtgggcaagctggccctcaaacctgtttctgtctgtcccatgcccattaaacagaagctcaggcccatgcccattaaacagatgctcaggctgtctcctctcccactgagctgctctgcaccaccctagcagctttcttatgtcagccccttgaggactggaaggaagtagtcagtttgccttgtgtgtgtttgatttttcagaatgtgtaagtacagtaagtcctcaccgtcattgatgggctcttggaaactgctactgtaagcataacaacacacaaccaaaccaattttatcataagctaattgatataaacaggatttaagtttctacggcatatttcaggttataaaaattaaccaaacttctaaataaagatccaaagtatttctaatattaaacatggaaatacatgtgagctattatatacatttcaggaagatgaataaaaacaagtaagatcattatctatacaagttttggtgagtgatgacagtgagtgatgacagtcatggtggtaggttaaatcaaggaataaatgtctgcaaagtgaaaattgtaaggcatacctcctaccaccaggaagttcaaaaacaaggacaaaagcggtgggctggctgagtgcttcttactgcatagtttattgtcatgtgtttgtgtgattatcgtagacttgatgactttttagtaggcagttacctgtattcattcatgcgttttccagcttgcttattccagttcaatgtcaccggtagctggagcctctcccagggcacaaagcctggacaggacgccgttccatcacaggacacacttgcacccacacctgctcagactgggaccacttagatgtccagttcactgaatgtgcacatctctgagatgtgaaagaaagcagagtacagagaaaacccacggagtcgtgagagcacacaaactccacacaggcagtgggtgcaggaattcttttttttttttcctcaacattgttataacaaatcaatgttgaatgaaatggcattatttgaggacctgctgtgtaaggactgaactgattttaagaatttttaggtcaggtgctgcggctcacacctgttatcccggaactttgggaggccaaggtgggcagattgcttgagcccaggagttcgagatcagcctgggcaagacagggaaaccctgtctctacaaaaaagtaaaaaacatagccaagcttggtggcacatgcctgtggtcccagctacttgggaggctgaggtagaaggattgcctgaggcaggaggtggaggttgcagtgtgctgagatcacgccactgcactccaacctgggtaatagaacgagaccctgtatcaaaaaaaaaaaaaaatttcttttttttttagagggtaggaagtgaaggggccaggcttcatcagcttaggatttaatgttagaggccacttctgtgcccctgtcaagcccagagaagtcatgcaggtcccatgaagggcagagcagatcccaattttaggaatttctttgatgggtgtatgagttgccatgggcagtgtgggagaagattaagagaagccatgcttatcccactcgtatccatggagcaactgccttgcagttgtctgggaaggaaaatccttgtgccgggcctggttgaaatgcccaaggaaggtagagaggatcccagagctggggagccgggtctagtcccaaatcactgggtgggtgggagatctggccaggacgtttcgtggccccctggtcaccagtgttgagtgggtcccctcagctggcaggcaggtccttccagcctctctgtccaccctacccccagcctttacaagtcattcacccttgcagggaaaggcacctctgctgaggggacccttctatgagatctaaacaggaggagtctcttcttttgagcctgagaacgagctcttctaataggcagatgtcacctcggcagacagcccactacttctcaattccacatctcccttcccgcctggaaaccccgtgagcctgggagcttaggagtcctcttcctagggggcccggccagctagcacctggccttctatggtgtggaggttttcctatacggaaattgctgaagggtggcctgccctggcattgttttgtggcgctgttggtggtattcatagctgacaggaattgccatgtgccaggccactattagctcatttatatttccagcagtctcagaaggcggagttaagagaagggtagagagaggtagtataatatgcctagagcagctcctctggtggcaaagccgggaggaaacccagctgtgggactccaggccttccctgtctccacatgactcgagaggactgagcttggccttgagaccatcaatgtctggctgtgtgtggcccccttggcccctagtgtccaggagcggggctgaccaccttggcatgtgcggggaagggtggggctgacctcatttagctttcctgccctttttttgctcctccttccaccgtgcttctgtcctacctgtttctgaatgggaaggacggctttttgaggaacagggtgtgactcttccctgcgaagacgttgccccagaaatttgtccccacgcattctccagccctcttccctttgccatgaatggcgtcatgttccaaaaatcctgtggccacgggctgtttgtcaagaccaaacagggaagaggcttttaaaatgtcactttccccctccagcttgaatacagtggggagcaggggcaggggccggggctgggcttgcaggacctgtgtgtgggcagagggaggccaggagcccagtgggagttgggggtagtttacagccagccagcagctgtgggccctgctgtccccgtgctatgatggggtgaactgtgtgtgtggttccttggttttgaggggttttttttttgaggtgaaattcacgcaacataaaattaaccattttagcatgtacaattccattgcatttagcctacagtattgtacaactgccacccctcttcagttgaaaacatttccattgctccaaaagaaccccccaccttaactattaagcagtcacccccgcctttagtccccagcaactacaaatctgctttgtgcctcaatggatttacctattctggaaatttcatcaaaacagaatcataccataccatatgtgaccttttgtctgtggtgtcttgcacttggcctaatgctttcaaggttcatccaccttgcagcacaggtcagaattcattccttgtatggatggtagacagtgggattgcttcacccttttggccgttgtggatagtgctgctgtgaacacaggtgtgcgggcatttgtctgaacacctcctttcagcggaccccaggagaggacttgctggcctgtggccattctgtcagtgagctgtttggcatcagcacctggagccacatgtcagccctgcagactgctgggtgggagggctatgggtgggtcccaaataaggcctgcccagagcctggggctcttcacagaggagtctgggatggaaactgggttcctggaccatccctcaagagtcgcacacatgaaatgccgccatgaggcagtgtcacggggcggtgcaggggtggctcagctgctcggaggtacacgccttctttcttccctttttgtctgacctgaagatcatctgactgccaagaaagaggcaagttaatccttaaacattgttggaaggagggctgtggggcatgggagctgaaggctggagaccccagggagacgcggtgccttcccagtgctaggtgctgggagctgctggcagagggcccacagagccccacagtggtccccagaggaccttggggtcagctagagggaaaaggcctttgctacgctgttcatcactgttaccagttttcaacctttatttctttggcagcaaaacacccacccccttgaaatgaaacgtggagctcacatatatgatgcacgaatgttctcatgttgaaggacaggaagaggaatggcatcagctatgagaccaccctgacccccacccgctgccccatcctacacccgaggtggcccctgaagcatgacctccagggatcttcacagtttgaagagccgctgatatactctaatacttgcagtaatattttttaatagaatgcaatattggatgtacacaaaaggatacaagcagcatacatttacaatataaatctaaataataaaaatgaatgctcgtgaacctgccacccaacttaagaaagagaacactgacatccattcaaagcatccttcacgcccctccccagtggtatccctttcacagaggtgacctgagatgatttaggggtgggagccgaggcccagatgggtagctcaggcattgcccttcacaccagtgctggtcgagctgttctagggaacacggacagaagcacattccagtggagtcccctgcttttctgactcctctccacaggctcagggacgttagtcctgtggcacagtaaaggtgcttatgtttgtggtccttcaagcccctctttgcaagcagggacctggggagaggattctaggggccagggggagcagggacccagggaggggatctaagactatggggaatggggacccagggaggagagctccaggactattaggagtagggaccccgggaggggagctccagggccgtggggaatggggacctggggaggagagctctaggactgttaggagtggggacccggggagtggagctccagggccgtggggagtggggacccggggaggagagccccaggggccatggagagtggggacccagggaggagagctccagggactgtggggagtggggacccagggagggctccaggtccattgagaaacaggtgttgcctctgtcacagcccctcctcctggcctcctcaccaaggcagaggtccgcattgttgagagaaaggttttcctgtctgcctgtgccttggagtctgtttcatttccagatggaccatatgtaacacagccaccaggagcaagtctggggttagatgtcgccttttaaggcagtgctgttggatagaaaggactcttgagtagaaaccaggagatagacttaaaggcaagtttgtgtttgggcacatggcaactgagaagtgggatcagcagggctgctccccaagcaaaggtgcagaaggggtggggacgtgctaggggagtgggtggctaggtcagcagttctcaaactttttgggttccagacccctttatgctcttgattattgaggccctcagaacgctttagtttacctgggttatgtccattggtatttcttgtattagaagttaaaactgaaaaagtttattcatgaattcacttaaaagtaacaataagcctattatgtagtcacgtaacatatattctgaaaaataacttttctaagacaaaaatttgctgaaaagcctcacatttttaactctttgcagagctctttacggtctgccataatgaaagacagctgggttctcagagcttctacagtctgtggccatagcatgtcctgtgtagcctttgggcagctctactgtacactcatgaaagagtgagagaggaggcaaaggatgttttagtatttttattaaaatggttttgactcagggaccccaaaaagggcctcagggactcccacctttgcagaccactggtcgagcttaagttgggccatgggcttgaggagcatgccggcctctataggaggggcagtgcagttcactgttccaggctgcgccgctgccttggggcctgctcggctgtggctgtgtcagcttcccacagacggtgtcccctgacttccatttctgaagtctgtcatttgccccctcccagggaagtctcccacactcctcccctttgctccctggcatggtgctgagttcctttccctttgcaccacctttcgtgtcttcgtctccttgttggtattcccagaggctttgcgaactttgcatcagtggccttgcagaggctggtagacatcaggggcatccctgacctgcctccatagagagcagcagaatgtggggatggggagtggcccagttgggaggtgagccaattgcagtctgcagggtcccgggtgggcatggctgttctgagttctgggaccagcagtcctggcataattagcagaatcccttttccttccccaagtactcccaattaagacaataaattacgttgagcaccttactgatgaggctctgaagtaggtggcttattggcccagcttttcctggggtgggtggaggtggtagcctgcacccagccttgatgtctttgcacaggtaggaaagagtccttctggaggacagcccccaatctccgccagcttcctgacctcctgcgcagatggccaggctgggtgtgtgctgcaggagggtggtctgtggctggctcatctggaagtaaaggctgtagggctcttccttccatgtgtgcctcatgggcaatgtgctttggggccccaccgggtccctaagcccccacttgcagcctcccagggccgtggccccagctgcatggatgtggggcagaactgagtgctgtgctggtgaggaccagacccctacccctgggagcacatctcacttgggaacatgcccttcacctgtgtcaccctttaccttctggaatggcctgctaaactggggaggagtgtcccatgggccagggccagtgtggaaccaggtggccttggtgcctgttttgcttccactgcttcctggctctatttacttggacagaccactgagtctctgtgtgcctcggtttcctggggtataaaatggaggtcatgagagctcatatgccctaagccctggggtcagctccactgccagcggggaggagtgcagacctgccctcgtgctcccatagctgggatgtatgtcctccctgcagaatgcattcctggcagctggtgagcaggtgttctccctcggaggcttggcttcctcccgggacagggctctgggtcctgatgatgttgaaacacttgcgggggctgtagctccatctttagtatctgcacagtggctggctgtttgtggaagcctatattgaggaaggtagtttgggtccacaactgtgtggctgtagagcaatagaacagtattctccaggactcaaggccccatggacaacttttagtagttctagcacagtttggtcaacacaggacaagcctgtggcctcttgaggggtctgcagtggtgaccagtgttcgtcggccctggcaggcttgttctgaaagagaagcccccattctgagcatggtcagaggtgtgtgctgagaacccactgtgggtgaggcaggtgggcacagctccgccaagaagcttccctccccaagtgctgagattcagagccactgatcctcttgcagtccatctgggtggccacaggacacacaaggtcttggcaggggtgaggcttgagactggactttgctgtgtgctcacccctgacttttactgacttacatcagaatgtcccagaaaagacggacaaccttgaagtctcccatgatttacaagcttagaaagagggccagacggctgctacccaggtatcctttctctttggaattgaaatgcagagaacattattaaacagcctatttgctgtgagtgtggaagtgtttccacagacacctttttgggaaaaagaaaagggcaagaatcaacctgaaaactacagaggatatattagccacggtttgcacgcattctgcttatggatctttcagtgactccagtgaggggccatctgtcccatccagtgcctgagtgcagcccccacccccacctttggtccagagaagtctttgccccaagaatctgcccagagttggggcatcagcccctacaggtgtgggtccttcttcaggactgtgtggaacttttccttttgaagaactttcctggggatgaccactctgcttggagtctggggtggagcctggtgtgagggagccagcgtagggtttgggtgcctgccccaccctcagaagcaggagcccagcagcccttggactgaccggtgctgttctggggctcccactggctccttccactgtggagcactcccgtgaacactgctttggtttgagtaccagtacaagtgttgggtgtatgttcctgaccttgaggcattcttgattgtgcagttacctagggtatgcttgtgtctgacatgatcattttttttttttaataaaaaatggcatggaaggagtatgtgtatttttctactgtagattatgaaactgagaatcacagagatactgccttgccctgggccacacatcgagtaggtggtggagccaagacttgaattggccttctcgttcccaggccagtgtacattaaatacctggagctgtgaggtcctgttggtggacagtagagtgtaggggttccctaactacacctacttcttgttctgccaggaatgaccaagatctcccctattgaagccactctgccagggttatatcagaagtcctgcgtgctcggtcaggcaggcatcttcccctcccttaaataataactggtaagtgccatgtagtggcatttacattacaaaaatggtaaaatcaagcaaaagcccccaaacctgctgctgatcttggcagtccgcataatagctgttttctcatcaactctcaatctttgtccatccttacatgtgttataaacagaactgaccacgagccccttgggagatgtgtgtgcttcatgtttttatctgcagggccttgagtggtgccagcttcagggcagctgctggagaaattctgttgcacacttccagggggtgccgttcaccagcggacagagcagcggagccatgaaggcctgcgcaggacaggccagctgcgttgatagtgtgggcggtgccctggagggcatcttgaatccttgtcctcgctggtaattaatggccaggtagcgtgttagggagtagatgtatagtcactctcgaaactgtttctctgttgggtgttgagctcttcccacatcaggaatgagactgtttgcttctctctttgtgagttcttcaggcccaggctctggacatgggctcactgtatcaggagtgtggaagcatcgtggctcttgcatgtggccgtgtgctgctgtctgagtgccagctttgtccacaccctgtctcttgtccttggtggcatagtgcacacagtggcacaactggagacttggactcgagaaaggagaagtacaagttggattcagccatgtgcgggggcaggccctggcttgtgtctacttgcgcctcagtgctgatcgtccctcactcctgggtgctgaccagcgttgtcctagtgacctgggagctcaggtgtgggaggcagaggtgcagtgcagcctggcttgcccaggtcttggctgggagggccttccagcagcactcagagctgttagggagcagttaccttttcagctgggtgggggtgactaataagtgtacctgtagacttgtgtttatttatttggtcattggagcccaactttgtactgggtgcttcactggatgaggcaggattcttgtccccagcgaggagatgtggtgttgtgagagagaaggaatacatttggcctggagccggttagtgttcttgaaggaggtgtgggattttgaggggtctgtgtatgagacagtgaatctccttattccatggaatagaagatgtttgtgtatgggaggtgagggggcatgggaccatagagggccttctgggtggcaggatgtgatggggtgagaagagtgagacccacctgtctgcatcgactgtttgaggcctgccctctttggtgccggattgcgcaatatgtctgactacctttctccccacccactgcagtctaaggacaggtgagtccaaggggacaggaaacctgggttaaccaccgttagagatcttgtcaccgactgttcccttctcttggagccacaaacaggccacacggagtgagagccaagcatgttgtgtgggctggttgtgatggggtggctgtgtccagagacctgtgcacgtctgagacgcatcagtggtggcagcttgacaacactgggtatagtaggctgagatgtttctctgtcccttgcccctggccacccgcttggggcagttgggcaacccagagttgagacagctgggttcatcctggcatgcatcccagatttgcctggggagggtggtgaggggaagggacagaagaacccttgagagaagggatgtgggtggcctccagggaagtagttggagaggccagcagagcatacgcggtgcagctcagggccatggcaggcaggcgtcactgaagaaggcccgtggccataccctgtagacccctgaggactgactgcagaggccacagtggctgagttttgtttttcggttttttttgttttgtttttttttttttgagatggagtctatctctgttgcccaggctggggtgcagtggcgcaatctcggctcactgcaacctccgcttcctgggttgaagcgattctcctgcctcggcgtcccaagtagctgggactacaggtgcgtgccactgtttttccttttttattaaactacttacgttgagataatcgtgtttcccctgtggttgtaacaaataacagagatcccatgtacccctttgcccaggtcctccgatggtgaccttctgcaacactgtggtacggcaccacggctgggatactgactacaatgcagaaagcacccagtgtctccatcgccttctccctcccacatcaacccaaccccagccacccaggaatcctgctccatttccataaatctgacatttcaagaatgttatgtgaagaaaatcatacaacctggaacctttgagattggcttttttcacctagaattctctggctattcatccaggttgttgcttggatcagtagtttgctcctttttattgctgactcgcattccatggtaagaggggacacctaggctgtttccagttttggtctgctacgaacaaagctgctataaccattcacatgtagtttttgtgtgagtgtatgttttcattccctggaataaatatccaggagtgcagttcctaggttgtaggtagttgcatgtttagtttttttaaaaactgccaaactgtctcacaccagcagtgtatgagtgatagatatacttactttgtgacgttgccagcatttggtgttgtcaccatttgttttttttagccattataaaataagatgttcataaatagcatgaacacctcttcatgctatttatcttctgtagaaagtcttctcgtgtcttttgctcatattctaattggattgttttgtgttttcactattgagtttgagggtctttatatagtctaaatactagtatatagtctagatattagtcctttgcaaaaggacatttgcaaaatattttatcctacttcgtggcttatcttttcatcttccttaggactttgtgcagagcaaaagtttttaattttaatgaagtccagtttatccatttaaatatgtttcattttgtcttgttttttgtataacactactttctgtatcagcttgagatgatttttttttttttttttttgcctgtggacgaagggtcactctagcaccatttgttgaaagactgtatttcctccattgaattctttctgcacctttgtcaaaattgggcatatttgtgttggtttattactaactactgttccattgatccatgtgtctgactttccaccaataccacacagtcttcattactgtggatatataataagtcttgtgattgggtaaatagattataccctcttttttttttaaattaaaaatattctagttcatttgcctttccatgtaaattttagaataatcttgtccatatctataaaaagtcttgctgggattttgatgggaattgtgttaaactgaatatcagttgggtgagaatagacatcttagaatcttgcagtccacgaacacattatgtctctcttatttagatcttctttgatttctctcatcagtgttgtgtagtgttcagcatttcctgtacatattgtgtggtatatacacctaagtatttcttttttttgaagcaattttaagtggtattgtattttaattttgatgtccacgtgtccgttgctagcatatagagatacaattgatttttgtatgctgatcctgtatcctgaaactttgttgaactcactagttctaggagttttttgtagattctgggattttctatacagacagctatgtcatctgtgaatattttattttgtcagttttgatctatatgccttttatttccttttcctgccttactgcactagctagaaattcgcgcactatgttgaataagaattctgagatggccatcattgcctagttcctgatattagagggaaagcaatcagcatttccccattatgtgtaatgctagctggaggttatttagagatgcttttatgaaattgagcaagttcccctctattcctactttctgagaggtttttaaaaataattatgaatggatgttggattttgtcaaatgctttttctgcatcagttgataggaccatgtggcttttcttctgtagagcattaatttggtggattacattggttgatttttgaatattaaaccggcatccctggaataaacccccttggtcatggtttataattctataaatatattgctgaattctatttactaatattttgttgatttttgcatctatagcagtccccctttatttgcaagagatacattccaacagccccagtggattcctcaaaccacggatagtactgaacctgattgctttcagttggaactcatttttgattggaaacaacctagatatcccctcatgtcaaacccacagatacttttttcatcttttttttttttttttttttttttttttttttttttttttttttttgagacagtgtcttgccctgccctgttgcccaggccggagtgtagtggtaaaagcatagctcactgcaaccttgaattcctgggctcaagtgatcctcatgcctcagcctcccacgtagctgggcctctgccagcacttgccaccacacctagctattaataatttttttttggtagaaacagggtcttgtagttcccaggctggtctcaaactcctggcttcatgccatcctcctgcttcagcctcccaaatgctggaattacaggtgtgagccaccacacccagccataaatactttttctatcttacctgggcacttcatcacgcacaagggctgtaacatttgcagttcgaggtgtgatagaaaaattagcatgaatttctttttctttctcaatttcagcgatagaagatttattcttactgtacatcttagcaacctcagcatatgattttttttcttaaattgaaaacttttaccatttcccttaaaggaagcactttatggcttctctttggcatattcaaattgctgtcatcactactcttgtgctttggggccattatgtataatactagctggatgcacaagcactgcaacaccaccacagtccatctgataactgacagctactaagtgactaaggggcaggtagagtatacagcgtggatgcgctggacaaaggggaggctccacatcctgggaagatggagcaggacgatgcaagatttcatcacactactcagaatggcatgcagtttaaaacctgtaaattatttcaggaattttccatttaatattttaaggctgtggttgaccgtgggtaagggaaaccgtggaactgtggatggaggaggggggaactactgtgtattaatgaggaatattagtccatagttctttatttcatttttaaaaaattttggggttttgtcatgtaatttgtttggttttggtgtcagggtaacaccagcttcataaaatgaattggaaagtgtttcttcttcttcttcttcttccttttttttttttttttttttttttaacaattatatagaattagtgtcagttccttaaacacttgttagaaatctccagtaaaaccatctgggcttggagatttcttttttgtgagttatggaattacatattcaatttccttaatagttatataatcatttaaattatgtgttttttagagaagtgggtccatttcctatatgttgtcaaattagtgttggtagaattgtattagtattcctcattatccctttgatgtctgcagaatctgtgatgctatccctgttttatttctgataacaatttgtgccattatgtctttttttttcttttttggtcttgtcagcagtgtttttttgttttgttttttgttttttgagatgaagtttcgctcttgttgcccaggctggaatgcagtggagcgatctcggctcactgcaacctctgcctcccaggttcaagcgattctgctgcctcagcctccagagtagctgggattacaggcatgctccactacgcccggctaattttatatttttagtagagacggggtttcttcatgttggtcaggctggtctcgaactcctgacctcaggtgatctgcccacctcggcctcccaaagtgctggaattacaggcatgaaccaccgcgcctggctgaagttgatcagttttatcagtctgttcaaagaaccagctctttgtttcactgattttttcattgatttctacctttatctttttttttttttctttttgagacgaagtctcactctgttgcccatgctggagtgcagtgttacagtcttggctcactgcaacctccgcctcccggtttcaggcaattctcctgcctcagcctcctgagtagctgggactacaggtgtgtgccaccacacccagctaatttttgtatttttagtagagatggggtttcactgtgttggccaggctggtctcaaactcctgaccttgtgatctgcttgcctcggtctgtaatcccatagtgctgggattacaggtgtgagccactgcgcccagcccgatttctacttttatcttttattatttccttctttttcttgcttttgatatattttgtacttatttttctaggttcttgagatagaagcttagattatttatttgagacctttcctcttttctaatgtgagcatcatagttacgttagttccctcctaggactgctttaattgtgttattgagagggatgttgaagtctccaacaatatttgtggatttatttatttttccttttagttctattagttttaacttcacataattttgcagctctgatgtttaaaggtgcatgaacatttaggctcactatgtctcagtgaattgacccttttatcattatataatattcctctttgtctctggtcattttctttgtgctgaaatataatttatctgataacataacaactctgctctccttagattaatattttcaggatgtatcacttttagttttttcttttcaacctgcctgtcatcattatatttgcagtgaattttttgtagacagtgtacagttgaattattttaaaaatctactctatcaatcttttaattggtgtatttagatcatttacatttaaaatatttacggataacttagggcatagttaatgcgtctctggttattatttctgttttgttttgcttttttttttttcctgcttcctttgggttacttgaacattttctttagaattgtattttgatttatatatcaaaatatagttttttaagtgtatctctttgtatatattttttactggttataataagacgtgactttatatagacataacttgtcacagtctcttggtggtgtcattttaccagttcaagagagtacctgtctgttcactcctttaccttttccttgtataattgtcttaagtgtttacttcacatacgtttagaaccacattagacagtttttgctttagtcacgaaacagaaaactcaagagaaggaaagcctaattatttaccccctccctccctttattttactgtgttctttcttcctttcagatgttccaggattccttcttctatgatttcctttttgtttagaaaacttcctttggccattttgctaggggtaagtcagcaaaaaacttctcttagttttccttcatctgagaaggtctggatttccctttcattcctgaaggatatttttactggttataggattctaggttgacaggtgttttctttcagcaccagaaaagtagtgtgccacttccttctggtctccatggttcctgataagaaatctattgtcattctgcttagttttctcaaaactataaggtcttatttttctctggctgcttttgagattttttttctctggctttctttgtcttttaggtttttctttagtttagttattgtatgtcttggtctggatttctttgggtttatcctttgatgttcactaaacttcttgaatgtgtaggttgccacttttgccaaatttgggaggtttctagccattctttgagccctttttccgcttcacccttcctcctatcctgcagagactctgatgacatgaatgttagacttcttgttacagttccacagttcccttttatttattcattttttcctgtctgtttttcctctgttattagatgggatgatttctgttgttctgtgttccagttcactgattctttcattgcccccaatccttctgctcttaagcccacccgggagcttttatttcagttaccgtatttttcaatttcaggatttttgtttggttcttacagcttctatttctttgctgtctttccctttaattcaagtgtgctcataatttcttgttgaagcattttatcatgggtgctttaaaatctttaaatgtgggataattctagcatggctgtcatcttggtgttggcatttcttggttgtctttgttcattcagtttgtgaccttcctggttcttggtatgatgatgatttttggtggaaaccaagtgtttttgtattctgttgggtgactctgggtctcatttgaaccttctctttcagtggatttttctgacagtgcttccgtgggggaagggagtcaccatgaccacctggttacttagatggagacagaagtccatccctcggcctccactgatgcctgaactgggaggctcctcatcatgggttcccttcccactgggcaatggtaaaaaccctgaccctcctctgggcgccctctgacacaccctagcatggagcaagaagggtcctcgttgctgttggtgggatgtaaggcccttgtgtcttctgacaccaccctggccggggtgtggggcacctcacaagggtggaagtccaacctttgctcacttgggggtggggtgctgcctttcctgtgacttttggccagagtaaggcggttcttgtctaagagttttctgtcttgttgggctgctcctttctggttcttcagctatggaaagtagctttttgttgttgttttttttggttgtgtgcccattggcgttttcaggttgccagtttctccagtacccactctgggatagtgagacaaaaagaaagcctgggagagtcaccacggtgtccttccttggatcctgggtccctggcccacttacctttttttctccacctttcagagtcttctcatgtttgtcttatacatgatggccccaggtttttggttgtacttagcaggagaaatctacatctgccccatcgtccaggaagcagaagtttcaaggcactgtttttgaaagagcttcaggttgaaggcacacccagaccaccagcagcctcttcctagaggccagccagaagtggagcctccgacttgtgtgggtcatgagtgaaggccgagtttaattggagaggaggtagctcgggggagtctctcatgtggtcacttttatatgggatccggagccacatgcatcctctgggaggacctgcatagaaaggggccctgtgtgcagggctgcttgaaacaggactcgggccccatcctttgggtccttacagcccagctcagatcccccatgtcaacaacagatacctgcttctcctgcctccctccaaaatgcccagcagctcaaccagaaaacagcaaagctaagcctacccacgcagcatttccagagcacactccctcctgcctgctgccttttgggctgtctgttttagtgtcccagtttcagattattataggaccgtctggaagagaatactttagggccttttagaggtgctgccccaggaccaggtgggcgtgcgtgggagcctctgcccgtgggcattgctgcacttaaagacactgtggtctgctgtgcgggggaggatgcagcagttttagatagtctgagacatagagaagcagcagctcttcctgggaggcctttcccacgccttggggatgaggacaggttgtctgagtcaggacctaggttatgtaaggagaaggtaactcagagagggcaccacccacccactgctggcctaggccggtgggcactcacctccactccctctgcacacctgcctcaggatcaaggacacagccagggctaggcagaccccatccctgccttcctggagcgaaggttctggggtgggggtggggggcaagacatgtcatagcaatgtaattacgtacataatgaaatggtaggtagaaattagttctgtgatgtgcagtgacggtaatggcagaagtgagttgttagagactgagggggagggtcaggactgtccccttgaggaagggacatttcggggaagccctgagggatggtagagagggccaggttttggggagctgaggaggctgggggaggctgcgcagcccacgtggctggctgtgagaggcaagagtggtggtgatatagctggccagttcctgtccctggctccctggacttgaggagtgagttctcagtaattacagatggctcctcatggccccatggcgccatcattcctgcctctgcacctgtgcatcagctgcgcccctgcccagagagtcctctccaccccaggcctccccctgttatctatggggtccttaccttcagggcttttttttaatagctttattaagataaaattcacacgtcatacgtttaacccatttaaatgatacaattctatgatttttaggatattccaactgatgtgcagccatcatcacagtcacttttagaacattacatcatcgccaaaagaaaccctgcacctcttggctgtcaccaaccccttccgccgtcccagccccaggcagccactcctctgctctctatcactctggaattgctttgatgaacgctgggtggggtgtcacctgcatcccagcctgctcctccacccagaggccctacatctcgctctctgctctgtgtctgcgccgcccgcccacctgcatcagtcccctctgtggtgatccatatcaggaagtcacagccaagcaaagtggctgctgcaggctccctggtatacagcacccagggccatgcacacggggttcctgagcagaggtttgctgacgatgcctgggttgagaccagggctcgggttctgagggaacagatgctgatcccttggctccccacagttcctcctggagaaaggtcaggtaaatgtagctgattatgtgatgacaccccaagccctgcctccagaggccagggtggtggcgcatagtcaagatggagatagaggaatggcttggcaggctagcctctggcctcacaggtgggcacttgtggccggtgagaggccgagctgggagtcacagagtccagatacacacagggagttgtccagctccggctttcccatgcaaggcctctgggtggggtctgcttaggatgtgcactcctgggtggggtgtggagaggccgagcgtgtgtgcccaccttgaggtttgctgggcacagctggagttcgtagagagcacagacctctcctcgcctttgcttctgccttcccaggtgggatttccaccacatactccttggccctcctggactatgtctgcagccaacacccactcccctgttgcagcaaagcaagcctctcctgtccttgcagctttcccccgaccccaggcacacagctccacttgcaccattcatggggaaagccagtgctcctggggaccttgaggaccctgcaggcggaagccaagtaaaggggggttcttggttcagcctggaggctgtgtggcctctggcacgtggcctgccctctctgagtcacggtctgcagctaccaaatgaggtagtgtggtggggcctcctagtttggagagcactgaataaaaagcacatcaggaggacccatgaggggtcctgtgtgtgtaagcagcagtcagagaacttgggttttaatttgtgttaccgccctccgaaaggcactggataaatgggactggttgtaccttttccaatgcattctcgccagctgggtgtggctgaggaaggagattgagccagagtgtctgtctagattccccttgttgagctcctcccgtggtctggggagtggggactctgtggctggtaaaatatagcagtgcctcacatttgttgagacctcacaggccagacactgtgctcagtgttctttgtgcagctttttaagttgagctataattcacatatcttaagattcactctcttaaagtatacagtttggtgagttttagcatatttacaatgttgtgcaaccatctccactgtctaattctagaatattttagtcacccacgaaagaaaccccatacctgttagctgtctctccttatttcctttcctccagtccctggcgaccactaatctgctttctgtgctgtggatttgcctattctggaccatttgcataagtggaattctgtaatatgtgggcttttgtgcctggcttctttgacttagcatcatgttttcggggttcctcggtgttgtggtgtatgttagtgcttcattcctttttctggctgaataatgttcccttgtgtggacccatcacactttgttcatctattcatctgtccatggatatttgggctgttaccaccttttggcaggtgtgaataatactgctatgaacattcatgtgcaggtatttatttgagcccctgttttccgttttcttgggtgtgtatacataggggtgaaattgctgggccctagggtaactctgcctttaactttctgaggaactgccagacttttccaaggtggcagcaccgttttacatccctgtgctgggttttactgattgcattatctcatcagtcctcacatcagagtcatgaggtttaggtagaattgtcatcactctcacttttcaaatgggagagtttgaactcaaagagtttctgcacgcagtcacacagccagtcagttgatgattctttggccagagctggctttgatcacgaaagcagtctcttctccaggccctgttttgtatcttcaggatgaagctttttgactgtgttgttcatgtcctatttcctggcgcctggcacacactgacactcacatatttgttgaataacatgtcattttttcctgatcttggtggcttgatcagtaacttgcaggagacagcatgtcttaggggatcctgtactctccaggttctcacactcctgccagggcctgtatgctctccaccccggatgctgcagaatccccgccagcctctgactctcaagcagctgcagacgcaccgcagtggaaataggtgtcatgacctctgcagagcagaggcaacatctgtttccagcgagtgcttgctgttaacttgacctgttctctcttctgggttgaaggctgctggtgacctgccctcttttttctcctctaggcaaaacccatttatggcggttggctgctcctggctccagatgggaccgactttgacaacccagtgcaccggtctcgggtaagggcatcagagccaactctcagggaggaaccagagaagggacccatctaagggtgaactggcagagtggaagagggagatggagagttgaacagtggatcctgggatagcaggaccagcagggctcccccatttggtgcacttgtacgttgtacagaaaaggtctcaattatacatagttgtgtgtagtgctcccttcagaatgaggagctctcatgtgggtgttgcctgttttgtgggtcaggttgactctaggaacagtaaaatggaagaggcaaaagagcagttaaaggtttgcattataccgagcagctcccaattccttccatgccaaggcctgcccctgtagcacctcccttcttcctgagccaggggttcagcacactagcactagtgaagggttgggggcccagaggccttggcttacctcttactaaaatgtgcattgcccagggcagggccccgctagagctgggaccatcattggcctgacctgtggtttgtttctctgccaggaagcccctctggatttgactccggttacaaaactctccttcctcacaaactttcttacagtgctgccgcttgcaccctataaattgcttccactcagccccctccatccccgggagctccctttcctcttcttcttagtttctgctgctcatcctttccccaccctgaatattacactttggagtaggggccttgggctgtgtattctggtcccacaggccttgcattgtgtctctgttctttgggattgcttctagaatgggttttgatttcagaggctgcacataaggcccttggaaatgttcctgggaaacatgttcaggtggcctcctctacacacccagcatagaccagccctctacaaggcctctttgcaaggccctttgagtccctgttcatgccacccagacaggagaactcaggcatcactggtccagctgggctgcagtttccagggagtagttccctttcctattttatatcaaggttgtacaaaattgccatttccagcctctgacaggagtctttttataaatgataaccctggcccaaagcagagagatgtgcttttatagtcagttcacgtggcctcactgccagttaaactctgagtattgttgggctctttgctttttttttttttttttttttttgaaacagagtcttgctctgtcacccaggctggagtgcagtggcatgatctcgattcagtgcagtcttgacctcccaggttcatgtgatcctcttacctcagcctcctgagtagctggggctacaggcgtgcatcaccatgcctagctaatttttgtattttttgtagagacggggtttcaccatgctgcccaggctggattgggcttgttgaaatgttgaaaataggtcatggacccttgtgatgatttggggctgggagctgtgcctgtcattcatgacctgggccagcagactcgcattatggacaagtcccttctccccacacaaaggaagacatacaccgcatagtccatttcatttcagctcctgatggcatctgaccgccgtggacacttcccagtggtctggcttttggagggagagtagagcgggggatgatctgtgccagttggtcactccttggatattggagttatttccactggtcttgctgctcctctgttttgattttcattaactcatttcacctcagtgaattctggagcctggctgtttttgtgcctcctctttgccagtggatcatcagaacaaccccttttgtagcagtttcccaggttttttcagaagtggtgaatccatgccttggcattcctggattattccatgtcatgtcagatcattcatcaaataaatattgacacatgtcatgtgatgcattctatgctgagcaccatcaggaatacaaaaaggtaaccacacgttgtttctgctcctgaggagcttccaagtgttaaaaaaaaaaaaaaaaaaagacttcttattaagcctcaatcactcatgtgatttgggcctgtctcccagcccagtcctggctgatgaatcaacattcttgtgcctcgggtccctcttttcctgccacctgccccagaagtggaatctgtggagtgaccttccttagatatggacttgtcagacgtgggaactccagaagccaagctctggggccaggacccagatcctcctaaccacccaccttgtgctccgttgcagaaatggcagcgacggttcttcatcctttacgagcacggcctcttgcgctacgccctggatgagatggtaagtgttatccttgcccactccctgtccccagccttcaccaagtccctccattacagtgcccttgcgttgtcatgtgagagcacagcagccatgtgctcctgcttgtgtctgtttgggagtgtggaatgttttgaagaacttgtggcacctgctggagacagctttaaaaacccagacctttggtttgaaacatcatcttctgtggtcttgagtgagaggaagaagtgagggaggaagtcatttctgttgaaggctaatagtgtggacttcactggagcactcctggttaggggaaagcaagggcaaagtcctggatcacgtgtgcaggctgtggacctgtgggcgtggggcaggggctggccctggggctggcacat
